(19) United States
(12) Patent Application Publication
(10) Pub. No.: US 2019/0203216 A1
(43) Pub. Date: Jul. 4, 2019

(54) METHODS AND COMPOSITIONS FOR TARGETING RNA POLYMERASES AND NON-CODING RNA BIOGENESIS TO SPECIFIC LOCI

(71) Applicant: The Regents of the University of California, Oakland, CA (US)

(72) Inventors: Steve E. JACOBSEN, Agoura Hills, CA (US); Javier GALLEGO-BARTOLOMÉ, Beverly Hills, CA (US); Ashot PAPIKIAN, Glendale, CA (US)

(73) Assignee: The Regents of the University of California, Oakland, CA (US)

(21) Appl. No.: 16/304,113

(22) PCT Filed: May 26, 2017
(86) PCT No.: PCT/US17/34844

§ 371 Date: Nov. 21, 2018

Related U.S. Application Data
(60) Provisional application No. 62/342,814, filed on May 27, 2016.
(60) Provisional application No. 62/450,504, filed on Jan. 25, 2017.

(51) Int. Cl. C12N 15/82; C12N 9/12; C07K 16/00

(52) U.S. Cl. CPC C12N 15/8216; C12N 9/1241; C07K 16/00; C07K 2317/622; C12N 2310/14; C12N 2310/20; C07K 2319/81; C12N 2310/3521

(57) ABSTRACT

The present disclosure relates to the use of recombinant proteins for inducing epigenetic modifications at specific loci, as well as to methods of using these recombinant proteins for reducing the expression of genes in plants.

### CROSS-REFERENCE TO RELATED APPLICATIONS

[0001] This application claims the benefit of U.S. Provisional Application No. 62/342,814, filed on May 27, 2016, and U.S. Provisional Application No. 62/450,504, filed on Jan. 25, 2017, the disclosures of which are incorporated herein by reference in their entirety.

### SUBMISSION OF SEQUENCE LISTING ON ASCII TEXT FILE

[0002] The content of the following submission on ASCII text file is incorporated herein by reference in its entirety: a computer readable form (CRF) of the Sequence Listing (file name: 262232001140SEQLIST.txt, date recorded: May 26, 2017, size: 3,490 KB).

### FIELD

[0003] The present disclosure relates to the use of recombinant proteins for inducing epigenetic modifications at specific loci, as well as to methods of using these recombinant proteins for reducing the expression of genes in plants.

### BACKGROUND

[0004] Epigenetic marks are enzyme-mediated chemical modifications of DNA and of its associated chromatin proteins. Although epigenetic marks do not alter the primary sequence of DNA, they do contain heritable information and play key roles in regulating genome function. Such modifications, including cytosine methylation, posttranslational modifications of histone tails and the histone core, and the positioning of nucleosomes (histone octamers wrapped with DNA), influence the transcriptional state and other functional aspects of chromatin. For example, methylation of DNA and certain residues on the histone H3N-terminal tail, such as H3 lysine 9 (H3K9), are important for transcriptional gene silencing and the formation of heterochromatin. Such marks are essential for the silencing of nongenic sequences, including transposons, pseudogenes, repetitive sequences, and integrated viruses, that become deleterious to cells if expressed and hence activated. Epigenetic gene silencing is also important in developmental phenomena such as imprinting in both plants and mammals, as well as in cell differentiation and reprogramming. Having the ability to specifically control target gene silencing is thus of great interest.

[0005] Different pathways involved in epigenetic silencing have been previously described, and include histone deacetylation, H3K27 and H3K9 methylation, H3K4 demethylation, and DNA methylation of promoters. An avenue to achieve DNA methylation is via a phenomenon known as RNA-directed DNA methylation, where non-coding RNAs act to direct methylation of a DNA sequence. In plants, proteins generally do not link the recognition of a specific DNA sequence with the establishment of an epigenetic state. Thus, endogenous plant epigenetic regulators generally cannot be used for epigenetic silencing of specific genes or transgenes in plants.

[0006] Accordingly, a need exists for improved epigenetic regulators that are capable of being targeted to specific loci to induce epigenetic gene silencing activity in plants.

### BRIEF SUMMARY

[0007] The present disclosure relates to a method for reducing expression of one or more target nucleic acids in a plant, the method including: (a) providing a plant including a recombinant nucleic acid encoding a recombinant polypeptide including a nuclease-deficient CAS9 polypeptide (dCAS9) or fragment thereof and a polypeptide selected from an SHH1 polypeptide or fragment thereof, an SHH2 polypeptide or fragment thereof, an AGO4 polypeptide or fragment thereof, an HDA6 polypeptide or fragment thereof, an NRPD1 polypeptide or fragment thereof, an NRPE1 polypeptide or fragment thereof, a JMJ14 polypeptide or fragment thereof, an RDR2 polypeptide or fragment thereof, an NRPD2A/NRPE2 polypeptide or fragment thereof, an NRPB3/NRPD3/NRPE3A polypeptide or fragment thereof, an NRPE3B polypeptide or fragment thereof, an NRPB11/NRPD11/NRPE11 polypeptide or fragment thereof, an NRPB10/NRPD10/NRPE10 polypeptide or fragment thereof, an NRPB12/NRPD12/NRPE12 polypeptide or fragment thereof, an NRPB6A/NRPD6A/NRPE6A polypeptide or fragment thereof, an NRPB6B/NRPD6B/NRPE6B polypeptide or fragment thereof, an NRPB8A/NRPE8A polypeptide or fragment thereof, an NRPB8B/NRPD8B/NRPE8B polypeptide or fragment thereof, an NRPE5 polypeptide or fragment thereof, an NRPD4/NRPE4 polypeptide or fragment thereof, an NRPE7 polypeptide or fragment thereof, an NRPD7 polypeptide or fragment thereof, an NRPB5/NRPD5 polypeptide or fragment thereof, an NRPB9A/NRPD9A/NRPE9A polypeptide or fragment thereof, an NRPB9B/NRPD9B/NRPE9B polypeptide or fragment thereof, an ATRX polypeptide or fragment thereof, a MOM1 polypeptide or fragment thereof, a MORC1 polypeptide or fragment thereof, an SssI polypeptide or fragment thereof, a DRM2-MTase polypeptide or fragment thereof, a DNMT3A polypeptide or fragment thereof, a DNMT3L polypeptide or fragment thereof, an MBD9 polypeptide or fragment thereof, a SUVH2 polypeptide or a fragment thereof, a SUVH9 polypeptide or a fragment thereof, a DMS3 polypeptide or a fragment thereof, a MORC6 polypeptide or a fragment thereof, a SUVR2 polypeptide or a fragment thereof, a DRD1 polypeptide or a fragment thereof, an RDM1 polypeptide or a fragment thereof, a DRM3 polypeptide or a fragment thereof, a DRM2 polypeptide or a fragment thereof, and an FRG polypeptide or a fragment thereof; and a crRNA and tracrRNA, or fusions thereof; and (b) growing the plant under conditions where the recombinant nucleic acid is expressed and where the recombinant polypeptide is targeted to the one or more target nucleic acids, thereby reducing expression of the one or more target nucleic acids. In some embodiments, the recombinant polypeptide interacts with an RNA polymerase. In some embodiments, the RNA polymerase is RNA polymerase IV or RNA polymerase V. In some embodiments that may be combined with any of the preceding embodiments, the recombinant polypeptide induces RNA-directed DNA methylation. In some embodiments that may be combined with any of the preceding embodiments, the one or more target nucleic acids are endogenous nucleic acids. In some embodiments that may be combined with any of the preceding embodiments, the one or more target nucleic acids are heterologous nucleic acids. In some embodiments that may be combined with any of the preceding embodiments, expression of the one or more target nucleic acids is silenced.

[0008] The present disclosure also relates to a recombinant nucleic acid which encodes a recombinant polypeptide including a nuclease-deficient CAS9 polypeptide (dCAS9) or fragment thereof and a polypeptide selected from an SHH1 polypeptide or fragment thereof, an SHH2 polypeptide or fragment thereof, an AGO4 polypeptide or fragment thereof, an HDA6 polypeptide or fragment thereof, an NRPD1 polypeptide or fragment thereof, an NRPE1 polypeptide or fragment thereof, a JMJ14 polypeptide or fragment thereof, an RDR2 polypeptide or fragment thereof, an NRPD2A/NRPE2 polypeptide or fragment thereof, an NRPB3/NRPD3/NRPE3A polypeptide or fragment thereof, an NRPE3B polypeptide or fragment thereof, an NRPB11/NRPD11/NRPE11 polypeptide or fragment thereof, an NRPB10/NRPD10/NRPE10 polypeptide or fragment thereof, an NRPB12/NRPD12/NRPE12 polypeptide or fragment thereof, an NRPB6A/NRPD6A/NRPE6A polypeptide or fragment thereof, an NRPB6B/NRPD6B/NRPE6B polypeptide or fragment thereof, an NRPB8A/NRPE8A polypeptide or fragment thereof, an NRPB8B/NRPD8B/NRPE8B polypeptide or fragment thereof, an NRPE5 polypeptide or fragment thereof, an NRPD4/NRPE4 polypeptide or fragment thereof, an NRPE7 polypeptide or fragment thereof, an NRPD7 polypeptide or fragment thereof, an NRPB5/NRPD5 polypeptide or fragment thereof, an NRPB9A/NRPD9A/NRPE9A polypeptide or fragment thereof, an NRPB9B/NRPD9B/NRPE9B polypeptide or fragment thereof, an ATRX polypeptide or fragment thereof, a MOM1 polypeptide or fragment thereof, a MORC1 polypeptide or fragment thereof, an SssI polypeptide or fragment thereof, a DRM2-MTase polypeptide or fragment thereof, a DNMT3A polypeptide or fragment thereof, a DNMT3L polypeptide or fragment thereof, an MBD9 polypeptide or fragment thereof, a SUVH2 polypeptide or a fragment thereof, a SUVH9 polypeptide or a fragment thereof, a DMS3 polypeptide or a fragment thereof, a MORC6 polypeptide or a fragment thereof, a SUVR2 polypeptide or a fragment thereof, a DRD1 polypeptide or a fragment thereof, an RDM1 polypeptide or a fragment thereof, a DRM3 polypeptide or a fragment thereof, a DRM2 polypeptide or a fragment thereof, and an FRG polypeptide or a fragment thereof. The present disclosure further relates to expression vectors including the recombinant nucleic acid of the preceding embodiment, and a host cell including the expression vector of the preceding embodiment. In some embodiments, the host cell is a plant cell. The present disclosure also relates to a recombinant plant including the recombinant nucleic acids of the preceding embodiments.

[0009] Other aspects of the present disclosure relate to a plant having reduced expression of one or more target nucleic acids according to the method of any one of the preceding embodiments, as well as a progeny plant of the plant of the preceding embodiment. In some embodiments, the progeny plant has reduced expression of the one or more target nucleic acids and does not include the recombinant nucleic acid.

[0010] The present disclosure also relates to a method for reducing expression of one or more target nucleic acids in a plant, the method including: (a) providing a plant including: a recombinant nucleic acid encoding a recombinant polypeptide selected from an SHH1-like protein, an SHH2-like protein, an AGO4-like protein, an HDA6-like protein, an NRPD1-like protein, an NRPE1-like protein, a JMJ14-like protein, an RDR2-like protein, an NRPD2A/NRPE2-like protein, an NRPB3/NRPD3/NRPE3A-like protein, an NRPE3B-like protein, an NRPB11/NRPD11/NRPE11-like protein, an NRPB10/NRPD10/NRPE10-like protein, an NRPB12/NRPD12/NRPE12-like protein, an NRPB6A/NRPD6A/NRPE6A-like protein, an NRPB6B/NRPD6B/NRPE6B-like protein, an NRPB8A/NRPE8A-like protein, an NRPB8B/NRPD8B/NRPE8B-like protein, an NRPE5-like protein, an NRPD4/NRPE4-like protein, an NRPE7-like protein, an NRPD7-like protein, an NRPB5/NRPD5-like protein, an NRPB9A/NRPD9A/NRPE9A-like protein, an NRPB9B/NRPD9B/NRPE9B-like protein, an ATRX-like protein, a MOM1-like protein, a MORC1-like protein, an SssI-like protein, a DRM2-MTase-like protein, a DNMT3A-like protein, a DNMT3L-like protein, a MBD9-like protein, an SUVH2-like protein, a SUVH9-like protein, a DMS3-like protein, a MORC6-like protein, a SUVR2-like protein, a DRD1-like protein, an RDM1-like protein, a DRM3-like protein, a DRM2-like protein, and an FRG-like protein; and a crRNA and tracrRNA, or fusions thereof, and where the plant expresses a dCAS9 protein; and (b) growing the plant under conditions where the recombinant nucleic acid is expressed and where the recombinant polypeptide is targeted to the one or more target nucleic acids, thereby reducing expression of the one or more target nucleic acids. In some embodiments, the recombinant polypeptide includes a dCAS9 protein or fragment thereof. In some embodiments, the recombinant polypeptide includes an MS2 coat protein or fragment thereof. In some embodiments, the recombinant polypeptide includes an scFV antibody or fragment thereof. In some embodiments that may be combined with any of the preceding embodiments, the recombinant polypeptide interacts with an RNA polymerase. In some embodiments, the RNA polymerase is RNA polymerase IV or RNA polymerase V. In some embodiments that may be combined with any of the preceding embodiments, the recombinant polypeptide induces RNA-directed DNA methylation. In some embodiments that may be combined with any of the preceding embodiments, the one or more target nucleic acids are endogenous nucleic acids. In some embodiments that may be combined with any of the preceding embodiments, the one or more target nucleic acids are heterologous nucleic acids. In some embodiments that may be combined with any of the preceding embodiments, expression of the one or more target nucleic acids is silenced.

[0011] The present disclosure also relates to a recombinant nucleic acid which encodes a recombinant polypeptide selected from an SHH1-like protein, an SHH2-like protein, an AGO4-like protein, an HDA6-like protein, an NRPD1-like protein, an NRPE1-like protein, a JMJ14-like protein, an RDR2-like protein, an NRPD2A/NRPE2-like protein, an NRPB3/NRPD3/NRPE3A-like protein, an NRPE3B-like protein, an NRPB11/NRPD11/NRPE11-like protein, an NRPB10/NRPD10/NRPE10-like protein, an NRPB12/NRPD12/NRPE12-like protein, an NRPB6A/NRPD6A/NRPE6A-like protein, an NRPB6B/NRPD6B/NRPE6B-like protein, an NRPB8A/NRPE8A-like protein, an NRPB8B/NRPD8B/NRPE8B-like protein, an NRPE5-like protein, an NRPD4/NRPE4-like protein, an NRPE7-like protein, an NRPD7-like protein, an NRPB5/NRPD5-like protein, an NRPB9A/NRPD9A/NRPE9A-like protein, an NRPB9B/NRPD9B/NRPE9B-like protein, an ATRX-like protein, a MOM1-like protein, a MORC1-like protein, an SssI-like protein, a DRM2-MTase-like protein, a DNMT3A-like protein, a DNMT3L-like protein, a MBD9-like protein, a SUVH2-like protein, a SUVH9-like protein, a DMS3-like protein, a MORC6-like protein, a SUVR2-like protein, a DRD1-like protein, an RDM1-like protein, a DRM3-like protein, a DRM2-like protein, and an FRG-like protein. The present disclosure further relates to expression vectors including the recombinant nucleic acid of the preceding embodiment, and a host cell including the expression vector of the preceding embodiment. In some embodiments, the host cell is a plant cell. The present disclosure also relates to a recombinant plant including the recombinant nucleic acids of the preceding embodiments.

[0012] Other aspects of the present disclosure relate to a plant having reduced expression of one or more target nucleic acids according to the method of any one of the preceding embodiments, as well as a progeny plant of the plant of the preceding embodiment. In some embodiments, the progeny plant has reduced expression of the one or more target nucleic acids and does not include the recombinant nucleic acid.

[0013] The present disclosure also relates to a method for reducing expression of one or more target nucleic acids in a plant, including: (a) providing a plant including a recombinant nucleic acid, where the recombinant nucleic acid encodes a recombinant polypeptide including a first amino acid sequence including a DNA-binding domain and a second amino acid sequence including a polypeptide selected from the group of an SHH1 polypeptide or fragment thereof, an SHH2 polypeptide or fragment thereof, an AGO4 polypeptide or fragment thereof, an HDA6 polypeptide or fragment thereof, an NRPD1 polypeptide or fragment thereof, an NRPE1 polypeptide or fragment thereof, a JMJ14 polypeptide or fragment thereof, an RDR2 polypeptide or fragment thereof, an NRPD2A/NRPE2 polypeptide or fragment thereof, an NRPB3/NRPD3/NRPE3A polypeptide or fragment thereof, an NRPE3B polypeptide or fragment thereof, an NRPB11/NRPD11/NRPE11 polypeptide or fragment thereof, an NRPB10/NRPD10/NRPE10 polypeptide or fragment thereof, an NRPB12/NRPD12/NRPE12 polypeptide or fragment thereof, an NRPB6A/NRPD6A/NRPE6A polypeptide or fragment thereof, an NRPB6B/NRPD6B/NRPE6B polypeptide or fragment thereof, an NRPB8A/NRPE8A polypeptide or fragment thereof, an NRPB8B/NRPD8B/NRPE8B polypeptide or fragment thereof, an NRPE5 polypeptide or fragment thereof, an NRPD4/NRPE4 polypeptide or fragment thereof, an NRPE7 polypeptide or fragment thereof, an NRPD7 polypeptide or fragment thereof, an NRPB5/NRPD5 polypeptide or fragment thereof, an NRPB9A/NRPD9A/NRPE9A polypeptide or fragment thereof, an NRPB9B/NRPD9B/NRPE9B polypeptide or fragment thereof, an ATRX polypeptide or fragment thereof, a MOM1 polypeptide or fragment thereof, a MORC1 polypeptide or fragment thereof, an SssI polypeptide or fragment thereof, a DRM2-MTase polypeptide or fragment thereof, a DNMT3A polypeptide or fragment thereof, a DNMT3L polypeptide or fragment thereof, an MBD9 polypeptide or fragment thereof, a SUVH2 polypeptide or a fragment thereof, a SUVH9 polypeptide or a fragment thereof, a DMS3 polypeptide or a fragment thereof, a MORC6 polypeptide or a fragment thereof, a SUVR2 polypeptide or a fragment thereof, a DRD1 polypeptide or a fragment thereof, an RDM1 polypeptide or a fragment thereof, a DRM3 polypeptide or a fragment thereof, a DRM2 polypeptide or a fragment thereof, and an FRG polypeptide or a fragment thereof; and (b) growing the plant under conditions where the recombinant polypeptide encoded by the recombinant nucleic acid is expressed and binds to the one or more target nucleic acids, thereby reducing expression of the one or more target nucleic acids. In some embodiments, the DNA-binding domain includes a zinc finger domain. In some embodiments, the zinc finger domain includes two, three, four, five, six, seven, eight, or nine zinc fingers. In some embodiments, the zinc finger domain is a zinc finger array. In some embodiments, the zinc finger domain is selected from the group of a Cys2His2 (C2H2) zinc finger domain, a CCCH zinc finger domain, a multi-cysteine zinc finger domain, and a zinc binuclear cluster domain. In some embodiments, the DNA-binding domain is selected from the group of a TAL effector targeting domain, a helix-turn-helix family DNA-binding domain, a basic domain, a ribbon-helix-helix domain, a TBP domain, a barrel dimer domain, a real homology domain, a BAH domain, a SANT domain, a Chromodomain, a Tudor domain, a Bromodomain, a PHD domain, a WD40 domain, and a MBD domain. In some embodiments, the DNA-binding domain includes a TAL effector targeting domain. In some embodiments, the DNA-binding domain includes three C2H2 zinc finger domains. In some embodiments, the recombinant polypeptide interacts with an RNA polymerase. In some embodiments, the RNA polymerase is RNA polymerase IV or RNA polymerase V. In some embodiments that may be combined with any of the preceding embodiments, the recombinant polypeptide induces RNA-directed DNA methylation. In some embodiments that may be combined with any of the preceding embodiments, the one or more target nucleic acids are endogenous nucleic acids. In some embodiments that may be combined with any of the preceding embodiments, the one or more target nucleic acids are heterologous nucleic acids. In some embodiments that may be combined with any of the preceding embodiments, expression of the one or more target nucleic acids is silenced.

[0014] In another aspect, the present disclosure provides a method for reducing expression of one or more target nucleic acids in a plant, including: (a) providing a plant including a recombinant polypeptide selected from an SHH1-like protein, an SHH2-like protein, an AGO4-like protein, an HDA6-like protein, an NRPD1-like protein, a JMJ14-like protein, an RDR2-like protein, an NRPD2A/NRPE2-like protein, an NRPB3/NRPD3/NRPE3A-like protein, an NRPE3B-like protein, an NRPB11/NRPD11/NRPE11-like protein, an NRPB10/NRPD10/NRPE10-like protein, an NRPB12/NRPD12/NRPE12-like protein, an NRPB6A/NRPD6A/NRPE6A-like protein, an NRPB6B/NRPD6B/NRPE6B-like protein, an NRPB8A/NRPE8A-like protein, an NRPB8B/NRPD8B/NRPE8B-like protein, an NRPE5-like protein, an NRPD4/NRPE4-like protein, an NRPE7-like protein, an NRPD7-like protein, an NRPB5/NRPD5-like protein, an NRPB9A/NRPD9A/NRPE9A-like protein, an NRPB9B/NRPD9B/NRPE9B-like protein, an ATRX-like protein, a MOM1-like protein, a MORC1-like protein, an SssI-like protein, a DRM2-MTase-like protein, a DNMT3A-like protein, a DNMT3L-like protein, a MBD9-like protein, a SUVH2-like protein, a SUVH9-like protein, a DMS3-like protein, a MORC6-like protein, a SUVR2-like protein, a DRD1-like protein, an RDM1-like protein, a DRM3-like protein, a DRM2-like protein, and an FRG-like protein; and (b) growing the plant under conditions whereby the recombinant polypeptide is targeted to the one or more target nucleic acids, thereby reducing expression of the one or more target nucleic acids.

[0015] In another aspect, the present disclosure provides a method for reducing expression of one or more target nucleic acids in a plant, including: (a) providing a plant including: a first recombinant polypeptide including a nuclease-deficient CAS9 polypeptide (dCAS9) or fragment thereof and a multimerized epitope; a second recombinant polypeptide including a DRM2-MTase polypeptide or a DNMT3A-DNMT3L fusion polypeptide, and an affinity polypeptide that specifically binds to the epitope; a crRNA and a tracrRNA, or fusions thereof; and (b) growing the plant under conditions whereby the first and second recombinant polypeptides are targeted to the one or more target nucleic acids, thereby reducing expression of the one or more target nucleic acids.

[0016] In another aspect, the present disclosure provides a recombinant vector including: a first nucleic acid sequence including a plant promoter and that encodes a recombinant polypeptide including a nuclease-deficient CAS9 polypeptide (dCAS9) or fragment thereof and a multimerized epitope; a second nucleic acid sequence including a plant promoter and that encodes a recombinant polypeptide including a DRM2-MTase polypeptide or a DNMT3A-DNMT3L fusion polypeptide, and an affinity polypeptide that specifically binds to the epitope; and a third nucleic acid sequence including a promoter and that encodes a crRNA and a tracrRNA, or fusions thereof. Also provided are host cells including the vector of the preceding embodiment, and a recombinant plant including the vector of the preceding embodiment.

[0017] In another aspect, the present disclosure provides a plant having reduced expression of one or more target nucleic acids as a consequence of the method of any of the preceding embodiments. Also provided is a progeny plant of the plant of the preceding embodiment. In some embodiments, the progeny plant has reduced expression of the one or more target nucleic acids and does not include the recombinant polypeptide targeted to the one or more target nucleic acids.

### DESCRIPTION OF THE FIGURES

[0018] The patent or application file contains at least one drawing executed in color. Copies of this patent or patent application publication with color drawings will be provided by the office upon request and payment of the necessary fee.

[0019] FIG. 1A and FIG. 1B illustrate an alignment of AGO4 and related proteins from A. thaliana.

[0020] FIG. 2 illustrates an alignment of HDA6 and related proteins from A. thaliana.

[0021] FIG. 3A and FIG. 3B illustrate an alignment of JMJ14 and related proteins from A. thaliana.

[0022] FIG. 4A and FIG. 4B illustrate an alignment of RDR2 and related proteins from A. thaliana.

[0023] FIG. 5 illustrates bisulfite sequencing results of an exemplary NRPD1-ZF transgenic line in an fwa-4 mutant background that exhibited early flowering.

[0024] FIG. 6 illustrates bisulfite sequencing results of exemplary AGO4-ZF, HDA6-ZF, JMJ14-ZF, NRPD2-ZF, RDR2-ZF, SHH2-ZF, SUVR2-ZF, and DMS3-ZF transgenic lines in an fwa-4 mutant background that exhibited early flowering.

[0025] FIG. 7A illustrates the structure of an exemplary fusion construct containing an epigenetic regulator C-terminally fused to a dCAS9 protein. FIG. 7B illustrates the structure of an exemplary fusion construct containing an epigenetic regulator N-terminally fused to a dCAS9 protein.

[0026] FIG. 8A illustrates the structure of an exemplary fusion construct containing an epigenetic regulator C-terminally fused to a dCAS9 protein. FIG. 8B illustrates the structure of an exemplary fusion construct containing an epigenetic regulator N-terminally fused to a dCAS9 protein.

[0027] FIG. 9 illustrates the structure of exemplary fusion constructs used in a modified CRISPR-targeting scheme involving the use of MS2 proteins.

[0028] FIG. 10 illustrates the structure of exemplary fusion constructs used in a modified CRISPR-targeting scheme involving the use of SunTag constructs.

[0029] FIG. 11 illustrates BS-PCR of the FWA promoter in agroinfiltrated leaves carrying the specified constructs 3 days post infiltration (dpi).

[0030] FIG. 12 illustrates relative expression of FWA-driven Luciferase in agroinfiltrated leaves carrying the specified constructs 3 days post infiltration, measured by real-time qPCR. Error bars=Standard error.

[0031] FIG. 13 illustrates methylation profiles of a wild-type Col-O plant compared to two fwa-4 plants that have been transformed with ZN-DRM2-MTase constructs. The promoter region of FWA is framed in red.

[0032] FIG. 14A illustrates a schematic of the ATRX-ZF expression cassette. FIG. 14B illustrates flowering time data for wild-type Col-O, fwa mutants, and two independent ATRX-ZF T2 lines (A19 and A21). N=32-50 plants for each plant line presented.

[0033] FIG. 15 illustrates methylation profiles at the FWA promoter region for wild-type Col-O, fwa-4 mutant, and two plants each from three independent ATRX-ZF T2 lines (A6, A19, and A21).

[0034] FIG. 16A illustrates a schematic of the MOM1-ZF expression cassette. FIG. 16B illustrates flowering time data for wild-type Col-O, fwa-4 mutant, and four independent MOM1-ZF T2 lines (M1, M2, M3, and M4). N=50 plants for each plant line presented.

[0035] FIG. 17 illustrates methylation profiles at the FWA promoter region for wild-type Col-O, fwa-4 mutant, and two plants each from three independent MOM1-ZF T2 lines (M1, M2, and M3). Line M2-2 is derived from a T1 line housing MOM-ZF, but M2-1 is a T2 plant that does not carry the MOM1-ZF transgene.

[0036] FIG. 18 illustrates flowering time of wild-type Col-O plants, fwa-4 mutant plants, and fwa-4 T1 plants transformed with ZF_SssI. Plants were grown on soil under long day photoperiods until the plants flowered, at which time flowering time was assessed.

[0037] FIG. 19 illustrates whole genome bisulfite sequencing results of T1 ZF_SssI and Col-O wild-type plants. DNA methylation of two independent transgenic lines that showed an early flowering phenotype was analysed by BS-seq. Methylation at different contexts (CG, CHG and CHH, where H is C, T, or A) is shown for a wild-type Col-O plant and a representative ZF108-SssI line in which ZF108-SssI was transformed into the unmethylated fwa-4 epimutant. The FWA promoter is marked in red.

[0038] FIG. 20 illustrates a genomic zoom-out of the whole genome bisulfite sequencing results presented in FIG. 19 for T1 ZF_SssI and Col-O wild-type plants. DNA methylation of two independent transgenic lines that showed an early flowering phenotype was analysed by BS-seq. Methylation at different contexts (CG, CHG and CHH, where H is C, T, or A) is shown for a wild-type Col-O plant and a representative ZF108-SssI line in which ZF108-SssI was transformed into the unmethylated fwa epimutant. The FWA promoter is marked in red.

[0039] FIG. 21A and FIG. 21B illustrate the phenotypes of ZF108-SssI T2 plants. Plants from some of the ZF108-SssI T2 lines displayed abnormal development and formed chimeras where different sectors of the same leaves displayed chlorosis.

[0040] FIG. 22 illustrates a schematic of the expression cassettes present in the vector housing the SunTag DRM2-MTase expression system.

[0041] FIG. 23 illustrates fluorescence microscopy of T2 A. thaliana plants (fwa-4) transformed with the iteration of the SunTag DRM2-MTase vector where DRM2-MTase was fused to an SV40-type NLS. Tissue shown is midvein tissue.

[0042] FIG. 24 illustrates SunTag-DRM2-MTase induction of DNA methylation of the FWA promoter. Results are from whole genome bisulfite sequencing from the unmethylated fwa epiallele (top row) and six different T2 plants containing the SunTag-DRM2-MTase system with gRNA4 targeted to FWA. Shown are CHH methylation tracks for four independent plants from transgenic line 1 and two independent plants from transgenic line 3. Bottom row shows signal from chromatin immunoprecipitation sequencing of dCas9 in a T2 SunTag+gRNA4 line. The methylation is highly localized to the region of the FWA promoter targeted by dCas9.

[0043] FIG. 25 illustrates SunTag-DRM2-MTase induction of DNA methylation at a genomic off-target. Results are from whole genome bisulfite sequencing from the unmethylated fwa epiallele (top row) and six different T2 plants containing the SunTag-DRM2-MTase system with gRNA4. Shown are CHH methylation tracks for four independent plants from transgenic line 1 and two independent plants from transgenic line 3. Bottom row shows signal from chromatin immunoprecipitation sequencing of dCas9 of a T2 SunTag+gRNA4 line. The methylation is highly localized at the region targeted by dCas9.

[0044] FIG. 26 illustrates McrBC PCR of samples expressing an artificial zinc finger fused to DRM2-Mtase (ZF_DRM2-MTase) designed to target the promoter of SUPERMAN gene. Blue bars represent the ratio of Digested vs Non-digested DNA samples from 3 independent T1 transgenic plants expressing the SUP-7F1_DRM2-MTase, or 4 different transgenic lines expressing the SUP-ZF3_DRM2-MTase, together with a wild type Col0 control using oligos specific for the SUPERMAN promoter. Red bars represent the ratio of Digested vs Non-digested of the same samples using oligos specific for a control region, not targeted by the fusion protein.

[0045] FIG. 27 illustrates whole genome bisulfite sequencing analysis. Screenshot of the region including the SUPERMAN gene showing methylation in different contexts (CG, CHG and CHH, where H is C, T or A) of Col0 wild type control plants, one line expressing SUP-ZF1_DRM2-MTase and one line expressing SUP-ZF3_DRM2-MTase. SUP-ZF1 and SUP-ZF3 Zinc Fingers bind to an overlapping sequence, with SUP-ZF1 targeted to an 18 base pair sequence and SUP-ZF3 targeted to a 15 base pair sequence. The SUP-ZF11 binding site is indicated with a pink square under the SUPERMAN promoter.

[0046] FIG. 28 illustrates a screenshot of the FWA region showing methylation levels of different lines expressing ZF108 fused to various proteins, along with control lines (Col0 and fwa-4). Different tracks indicate different cytosine methylation context (CG, CHG and CHH, where H is C, A or T). ZF108 Chromatin Immunoprecipitation (ChIP) indicates the specific location of ZF108 binding to the FWA promoter.

[0047] FIG. 29 illustrates a screenshot at a ZF108-related locus showing methylation levels of different lines expressing ZF108 fused to various proteins, along with control lines (Col0 and fwa-4). Different tracks indicate different cytosine methylation context (CG, CHG and CHH, where H is C, A or T). ZF108 Chromatin Immunoprecipitation (ChIP) indicates the specific location of ZF108 binding to a location near the At4g09510 gene, which contains a DNA sequence which is very similar to the sequence targeted at FWA.

[0048] FIG. 30 illustrates screenshots showing ChIP-seq signals from ZF108-HA lines and ZF108-DMS3 lines in either the region of the designed zinc finger binding site (CGGAAAGATGTATGGGCT) in the FWA promoter (top panel), or at a region on chromosome 4 containing two DNA sequences which are very close in sequence to the designed ZF108 sequence (bottom panel). The FWA region contains two sequences that are identical to the ZF108 binding sites. The additional region on chromosome 4 contains two sequences that contain 17 matches to the ZF108 binding site.

[0049] FIG. 31 illustrates flowering time of DMS3-ZF T1 plants. Flowering time of T1 plants in fwa-4 or fwa-4 crossed with drm1/2 “drm12”. Wild type “Col0” and fwa-4 “fwa” controls were also measured. Flowering time of T1 plants was scored as total number of leaves after flowering.

[0050] FIG. 32 illustrates flowering time of HDA6-ZF T1 plants. Flowering time of T1 plants in fwa-4 or fwa-4 crossed with drm1/2 “drm12”. Wild type “Col0” and fwa-4 “fwa” controls were also measured. Flowering time of T1 plants was scored as total number of leaves after flowering.

[0051] FIG. 33 illustrates flowering time of JMJ14-ZF T1 plants. Flowering time of T1 plants in fwa-4 or fwa-4 crossed with drm1/2 “drm12”. Wild type “Col0” and fwa-4 “fwa” controls were also measured. Flowering time of T1 plants was scored as total number of leaves after flowering.

[0052] FIG. 34 illustrates flowering time of SHH2-ZF T1 plants. Flowering time of T1 plants in fwa-4 or fwa-4 crossed with drm1/2 “drm12”. Wild type “Col0” and fwa-4 “fwa” controls were also measured. Flowering time of T1 plants was scored as total number of leaves after flowering.

[0053] FIG. 35 illustrates DNA methylation analysis of two early flowering T1 plants in either fwa-4 or fwa-4 crossed with drm1/2 “drm12”, analyzed by BS-PCR. Methylation levels at 3 different regions of the FWA promoter and one control region, corresponding to a downstream gene, are shown.

[0054] FIG. 36 illustrates a screenshot of Whole-Genome Bisulfite Sequencing data of the FWA promoter region for different lines expressing various ZF108 fusion proteins. Even though these plants displayed an early flowering phenotype indicative of FWA silencing, this data shows that these proteins are capable of causing silencing without inducing DNA methylation of FWA.

[0055] FIG. 37 illustrates flowering time of T3 populations derived from ZF-SssI T2 plants (ZF-SssI transformed into the fwa-4 epimutant) that had the ZF-SssI transgene (ZF+) or had segregated it away (ZF−). Col0 and fwa-4 were used as controls for flowering time.

[0056] FIG. 38 illustrates a screenshot at the FWA locus of whole genome bisulfite sequencing data corresponding to T2 or T3 plants from a line that expresses ZF108-SssI (ZF+) or where the transgene has been segregated out (ZF—).

[0057] FIG. 39 illustrates a zoomed out view of the region presented in FIG. 38. FWA promoter is indicated with an arrow.

[0058] FIG. 40 illustrates McrBC-PCR of Col0, fwa-4 and 7 independent T1 transgenic lines expressing MBD9-ZF. qPCR was performed using oligos specific for the FWA promoter or a control region. The ratio between digested and undigested samples is shown.

[0059] FIG. 41 illustrates amino acid alignment of the methyl-binding domain of different MBD proteins from Arabidopsis and humans. Red indicates high amino acid conservation while blue indicates low conservation. Proteins were aligned using CLC Main Workbench software.

[0060] FIG. 42 illustrates whole-genome bisulfite sequencing data of T1 SunTag DRM2-MTase (DRM) Arabidopsis thaliana transgenic plants (Columbia background) with two sgRNAs driven by the U6 promoter targeting SUPERMAN (SUP). Shown in the figure are CHH methylation tracks of the Col control, T1 SunTag DRM SUP line1, T1 SunTag DRM SUP line2, T1 SunTag DRM SUP line3, and T1 SunTag DRM SUP line4. SUPERMAN is annotated at the top of the tracks. Targeted methylation is present in SUPERMAN's promoter and extends through the transcriptional start site.

[0061] FIG. 43 illustrates whole-genome bisulfite sequencing data of T1 SunTag DRM2-MTase (DRM) Arabidopsis thaliana transgenic plants (Columbia background) with two sgRNAs driven by the U6 promoter targeting SUPERMAN (SUP). Shown in the figure are CHG methylation tracks of the Col control, T1 SunTag DRM SUP line1, T1 SunTag DRM SUP line2, T1 SunTag DRM SUP line3, and T1 SunTag DRM SUP line4. SUPERMAN is annotated at the top of the tracks. Targeted methylation is present in SUPERMAN's promoter and extends through the transcriptional start site.

[0062] FIG. 44 illustrates qRT-PCR expression data of SUPERMAN in flowers of T1 SunTag DRM SUP line1 plants as compared to the Col control. Transgenic plants show about a 2-fold downregulation of SUPERMAN transcripts relative to Col. Error bars indicate SEM of two replicates.

[0063] FIG. 45 illustrates whole-genome bisulfite sequencing data of T1 SunTag DNMT3A-3L Arabidopsis thaliana transgenic plants (fwa-4 background) with sgRNA #4 (g4) driven by the U6 promoter targeting FWA. Shown in the figure are CG methylation tracks of the fwa-4 control, and two early flowering lines: T1 SunTag DNMT3A-3L g4 line2 and T1 SunTag DNMT3A-3L g4 line3. Targeted methylation is present at the 5′ end of the gene.

### DETAILED DESCRIPTION

### Overview

[0064] The following description is presented to enable a person of ordinary skill in the art to make and use the various embodiments. Descriptions of specific devices, techniques, methods, and applications are provided only as examples. Various modifications to the examples described herein will be readily apparent to those of ordinary skill in the art, and the general principles defined herein may be applied to other examples and applications without departing from the spirit and scope of the various embodiments. Thus, the various embodiments are not intended to be limited to the examples described herein and shown.

[0065] The present disclosure relates to the use of recombinant proteins for inducing epigenetic modifications at specific loci, as well as to methods of using these recombinant proteins for reducing the expression of genes in plants.

[0066] In Arabidopsis, establishment of all DNA methylation and maintenance of much of the non-CG methylation involves the RNA-directed DNA methylation (RdDM) pathway (Aufsatz et al., 2002; Pelissier and Wassenegger, 2000). DNA methylation is first established by a protein called DRM2 and is targeted by 24 nt small interfering RNAs (siRNAs) through the RdDM pathway that involves two plant-specific RNA polymerases: RNA Polymerase IV (Pol IV), which functions to initiate siRNA biogenesis; and RNA Polymerase V (Pol V), which functions in the downstream DNA methyltransferase targeting phase of the RdDM pathway to generate non-coding scaffold transcripts that recruit downstream RdDM factors. Thus, RNA-directed DNA methylation (RdDM) in Arabidopsis involves both the synthesis of non-coding, small-interfering RNAs by Pol IV and the synthesis of non-coding scaffold RNAs by Pol V.

[0067] Specifically, and without wishing to be bound by theory, it is believed that there are two main steps in this pathway that are thought to target the DNA methyltransferase, DOMAINS REARRANGED METHYLTRANSFERASE 2 (DRM2)(Cao and Jacobsen, 2002). The first upstream step involves the synthesis of 24 nucleotide small interfering RNAs (siRNAs) by the concerted actions of RNA POLYMERASE IV (Pol IV or NRPD), RNA-DIRECTED RNA POLYMERASE 2 (RDR2) and DICER-LIKE 3 (DCL3)(Pontier et al., 2005). The second downstream step involves the production of scaffold transcripts by RNA POLYMERASE V (Pol V or NRPE) with the help of the DDR complex (DRD1, a SWI/SNF2 chromatin remodeler; DMS3, a chromosomal architectural protein; RDM1, unknown function). Without wishing to be bound by theory, it is then believed that ARGONAUTE 4 (AGO4) loaded with a 24 nucleotide siRNA binds to Pol V transcripts and, in an unknown fashion, acts to direct DRM2 to DNA for methylation (Law et al., 2010; Pikaard et al., 2008; Wierzbicki et al., 2009).

[0068] It is clear that there are a multitude of proteins involved in the epigenetic regulation of plant genomes. Applicants have previously shown that a protein called SHH1 acts in the RdDM pathway to enable siRNA production from RdDM targets and that SHH1 is required for RNA polymerase IV (Pol IV) occupancy at these target loci. Applicants have also previously shown that Pol V association with chromatin is dependent on two proteins called SUVH2 and SUVH9. These results have also highlighted that the RdDM pathway is a self-reinforcing loop mechanism, meaning that targeting of various components in different parts of the pathway to DNA are likely to initiate the entire pathway and cause RNA-directed DNA methylation.

[0069] The present disclosure is based, at least in part, on Applicant's discovery that various epigenetic regulators may be recombinantly fused to a zinc finger DNA-binding domain that targets a specific nucleic acid sequence, and that the targeted nucleic acid is then silenced in plants harboring the genetically modified epigenetic regulator. Epigenetic regulators where this approach has been successful, as described herein, include e.g. SHH1, SHH2, AGO4, HDA6, NRPD1, NRPE1, JMJ14, RDR2, and NRPD2A/NRPE2. Advantageously, and without wishing to be bound by theory, such recombinant proteins can be used to recruit Pol IV and/or Pol V to target loci to induce RNA-directed DNA methylation at the target loci, and thus to silence the target loci.

[0070] Of particular note, Applicants have shown that various components of RNA Pol IV (e.g. NRPD1) and RNA Pol V (e.g. NRPE2) can be directly targeted to a specific locus using the methods of the present disclosure, as opposed to being recruited to the target locus via other epigenetic regulators involved in the RNA-directed DNA methylation pathway according to the methods of the present disclosure. Various other components of RNA Pol IV and/or RNA Pol V may be used according to the methods of the present disclosure to target RNA Pol IV and/or RNA Pol V to a target locus and silence the locus.

[0071] Other exemplary proteins useful in the methods of the present disclosure for targeting Pol IV, Pol V, DNA methylation, and/or gene silencing to specific loci include e.g. any one of a modified NRPB3/NRPD3/NRPE3A, NRPE3B, NRPB11/NRPD11/NRPE11, NRPB10/NRPD10/NRPE10, NRPB12/NRPD12/NRPE12, NRPB6A/NRPD6A/NRPE6A, NRPB6B/NRPD6B/NRPE6B, NRPB8A/NRPE8A, NRPB8B/NRPD8B/NRPE8B, NRPE5, NRPD4/NRPE4, NRPE7, NRPD7, NRPB5/NRPD5, NRPB9A/NRPD9A/NRPE9A, NRPB9B/NRPD9B/NRPE9B, ATRX, MOM1, MORC1, SssI, DRM2-MTase, DNMT3A, DNMT3L, MBD9, SUVH2, SUVH9, DMS3, MORC6, SUVR2, DRD1, RDM1, DRM3, DRM2, FRG, and homologs and orthologs thereof. These proteins may be engineered to specifically bind different DNA sequences by introducing a heterologous DNA-binding domain into the protein or a fragment of the protein such as, for example, a heterologous zinc finger domain or TAL effector targeting domain.

[0072] Accordingly, the present disclosure provides methods for silencing specific loci in plants using one or more of an SHH1 protein, an SHH2 protein, an AGO4 protein, an HDA6 protein, an NRPD1 protein, an NRPE1 protein, a JMJ14 protein, an RDR2 protein, an NRPD2A/NRPE2 protein, an NRPB3/NRPD3/NRPE3A protein, an NRPE3B protein, an NRPB11/NRPD11/NRPE11 protein, an NRPB10/NRPD10/NRPE10 protein, an NRPB12/NRPD12/NRPE12 protein, an NRPB6A/NRPD6A/NRPE6A protein, an NRPB6B/NRPD6B/NRPE6B protein, an NRPB8A/NRPE8A protein, an NRPB8B/NRPD8B/NRPE8B protein, an NRPE5 protein, an NRPD4/NRPE4 protein, an NRPE7 protein, an NRPD7 protein, an NRPB5/NRPD5 protein, an NRPB9A/NRPD9A/NRPE9A protein, an NRPB9B/NRPD9B/NRPE9B protein, an ATRX protein, a MOM1 protein, a MORC1 protein, an SssI protein, a DRM2-MTase protein, a DNMT3A protein, a DNMT3L protein, a MBD9 protein, a SUVH2 protein, a SUVH9 protein, a DMS3 protein, a MORC6 protein, a SUVR2 protein, a DRD1 protein, an RDM1 protein, a DRM3 protein, a DRM2 protein, and/or an FRG protein that have been engineered to specifically bind different DNA sequences via the introduction of a heterologous DNA-binding domain into the protein. Each one of the aforementioned modified proteins may be expressed in a host cell individually or in various combinations to act to silence a target locus. For example, a modified SHH1 protein having a heterologous DNA-binding domain may be expressed in a host cell to target Pol IV to a target locus in conjunction with one or more modified epigenetic regulators having a heterologous DNA-binding domain to target Pol V to that same target locus to trigger RNA-directed DNA methylation and epigenetic silencing of that target locus.

[0073] The present disclosure also provides modified epigenetic regulators such as, for example, a modified SHH1, SHH2, AGO4, HDA6, NRPD1, NRPE1, JMJ14, RDR2, NRPD2A/NRPE2, NRPB3/NRPD3/NRPE3A, NRPE3B, NRPB11/NRPD11/NRPE11, NRPB10/NRPD10/NRPE10, NRPB12/NRPD12/NRPE12, NRPB6A/NRPD6A/NRPE6A, NRPB6B/NRPD6B/NRPE6B, NRPB8A/NRPE8A, NRPB8B/NRPD8B/NRPE8B, NRPE5, NRPD4/NRPE4, NRPE7, NRPD7, NRPB5/NRPD5, NRPB9A/NRPD9A/NRPE9A, NRPB9B/NRPD9B/NRPE9B, ATRX, MOM1, MORC1, SssI, DRM2-MTase, DNMT3A, DNMT3L, MBD9, SUVH2, SUVH9, DMS3, MORC6, SUVR2, DRD1, RDM1, DRM3, DRM2, and/or FRG protein that can be targeted to a specific locus of interest using a CRISPR-CAS9 targeting system. CRISPR-CAS9 systems involve the use of a CRISPR RNA (crRNA), a trans-activating CRISPR RNA (tracrRNA), and a CAS9 protein. The crRNA and tracrRNA aid in directing the CAS9 protein to a target nucleic acid sequence, and these RNA molecules can be specifically engineered to target specific nucleic acid sequences. In particular, certain aspects of the present disclosure involve the use of a single guide RNA (gRNA) that reconstitutes the function of the .crRNA and the tracrRNA. Further, certain aspects of the present disclosure involve a CAS9 protein that does not exhibit DNA cleavage activity (dCAS9). As disclosed herein, gRNA molecules may be used to direct the dCAS9 protein to a target nucleic acid sequence. By recombinantly fusing an epigenetic regulator of the present disclosure to a dCAS9 protein, use of the CRISPR targeting system allows for delivering an epigenetic regulator directly to a target nucleic acid. Once at the target nucleic acid, the epigenetic regulator can act to induce RNA-directed DNA methylation and epigenetic silencing of the target nucleic acid.

[0074] Accordingly, the present disclosure provides methods for CRISPR-targeting of an epigenetic regulator to a specific locus and for silencing that target locus in host cells using one or more proteins of the present disclosure such as, for example, an SHH1 protein, an SHH2 protein, an AGO4 protein, an HDA6 protein, an NRPD1 protein, an NRPE1 protein, a JMJ14 protein, an RDR2 protein, an NRPD2A/NRPE2 protein, an NRPB3/NRPD3/NRPE3A protein, an NRPE3B protein, an NRPB11/NRPD11/NRPE11 protein, an NRPB10/NRPD10/NRPE10 protein, an NRPB12/NRPD12/NRPE12 protein, an NRPB6A/NRPD6A/NRPE6A protein, an NRPB6B/NRPD6B/NRPE6B protein, an NRPB8A/NRPE8A protein, an NRPB8B/NRPD8B/NRPE8B protein, an NRPE5 protein, an NRPD4/NRPE4 protein, an NRPE7 protein, an NRPD7 protein, an NRPB5/NRPD5 protein, an NRPB9A/NRPD9A/NRPE9A protein, an NRPB9B/NRPD9B/NRPE9B protein, an ATRX protein, a MOM1 protein, a MORC1 protein, an SssI protein, a DRM2-MTase protein, a DNMT3A protein, a DNMT3L protein, a MBD9 protein, a SUVH2 protein, a SUVH9 protein, a DMS3 protein, a MORC6 protein, a SUVR2 protein, a DRD1 protein, an RDM1 protein, a DRM3 protein, a DRM2 protein, and/or an FRG protein that is recombinantly fused to a CAS9 protein, such as a nuclease-deficient CAS9 protein. The methods of the present disclosure also involve the use of a crRNA and tracrRNA to interact with the target nucleic acid to be silenced. The crRNA and tracrRNA directs the recombinant protein of the present disclosure fused to a CAS9 protein to the target nucleic acid, thereby facilitating the epigenetic silencing of the target nucleic acid.

[0075] Each one of the aforementioned modified proteins may be expressed in a host cell individually or in various combinations to act to silence a target locus. For example, a modified SHH1 protein recombinantly fused to a CAS9 protein may be expressed in a host cell to target Pol IV and/or Pol V to a target locus in conjunction with one or more of the modified epigenetic regulators of the present disclosure to trigger RNA-directed DNA methylation and epigenetic silencing of that target locus.

[0076] The methods of the present disclosure for silencing target loci in host cells may also involve the introduction of small interfering RNAs (siRNAs) at a target locus in conjunction with Pol V targeting by one or more proteins of the present disclosure. Methods of generating siRNAs are well-known in the art. These methods include, for example, expression of hairpin RNAs that are naturally processed into small interfering RNAs in cells. Hairpin constructs that make small interfering RNAs are known in the art (EMBO Reports, 2006 November; 7(11):1168-75). Additional methods for generating siRNAs include, for example, the direct introduction of small interfering RNAs into a cell from exogenous sources. Methods describing bombardment of siRNAs into plants are known in the art (Science 328, 912 (2010)). RNA molecules may also be sprayed (exogenous application) onto a plant so that small RNAs can then be generated in a plant cell (See U.S. Patent Application 2014/0018241). Accordingly, the methods of the present disclosure for silencing target loci in host cells may also involve the introduction of small interfering RNAs (siRNAs) at a target locus in conjunction with Pol V targeting by one or more modified epigenetic regulators of the present disclosure.

[0077] Accordingly, certain aspects of the present disclosure relate to targeting an epigenetic regulator to a target nucleic acid using one or more SHH1-like proteins, SHH2-like proteins, AGO4-like proteins, HDA6-like proteins, NRPD1-like proteins, NRPE1-like proteins, JMJ14-like proteins, RDR2-like proteins, NRPD2A/NRPE2-like proteins, NRPB3/NRPD3/NRPE3A-like proteins, NRPE3B-like proteins, NRPB11/NRPD11/NRPE11-like proteins, NRPB10/NRPD10/NRPE10-like proteins, NRPB12/NRPD12/NRPE12-like proteins, NRPB6A/NRPD6A/NRPE6A-like proteins, NRPB6B/NRPD6B/NRPE6B-like proteins, NRPB8A/NRPE8A-like proteins, NRPB8B/NRPD8B/NRPE8B-like proteins, NRPE5-like proteins, NRPD4/NRPE4-like proteins, NRPE7-like proteins, NRPD7-like proteins, NRPB5/NRPD5-like proteins, NRPB9A/NRPD9A/NRPE9A-like proteins, NRPB9B/NRPD9B/NRPE9B-like proteins, ATRX-like proteins, MOM1-like proteins, MORC1-like proteins, SssI-like proteins, DRM2-MTase-like proteins, DNMT3A-like proteins, DNMT3L-like proteins, MBD9-like proteins, SUVH2-like proteins, SUVH9-like proteins, DMS3-like proteins, MORC6-like proteins, SUVR2-like proteins, DRD1-like proteins, RDM1 like proteins, DRM3-like proteins, DRM2-like proteins, and/or FRG-like proteins, or a fragment of the full-length coding sequence thereof, as well as containing a heterologous coding sequence that encodes a protein involved in the targeting and/or recruitment of the respective epigenetic regulator to a target nucleic acid via the CRISPR-CAS9 system. Thus, in some embodiments, SHH1-like proteins, SHH2-like proteins, AGO4-like proteins, HDA6-like proteins, NRPD1-like proteins, NRPE1-like proteins, JMJ14-like proteins, RDR2-like proteins, NRPD2A/NRPE2-like proteins, NRPB3/NRPD3/NRPE3A-like proteins, NRPE3B-like proteins, NRPB11/NRPD11/NRPE11-like proteins, NRPB10/NRPD10/NRPE10-like proteins, NRPB12/NRPD12/NRPE12-like proteins, NRPB6A/NRPD6A/NRPE6A-like proteins, NRPB6B/NRPD6B/NRPE6B-like proteins, NRPB8A/NRPE8A-like proteins, NRPB8B/NRPD8B/NRPE8B-like proteins, NRPE5-like proteins, NRPD4/NRPE4-like proteins, NRPE7-like proteins, NRPD7-like proteins, NRPB5/NRPD5-like proteins, NRPB9A/NRPD9A/NRPE9A-like proteins, NRPB9B/NRPD9B/NRPE9B-like proteins, ATRX-like proteins, MOM1-like proteins, MORC1-like proteins, SssI-like proteins, DRM2-MTase-like proteins, DNMT3A-like proteins, DNMT3L-like proteins, MBD9-like proteins, SUVH2-like proteins, SUVH9-like proteins, DMS3-like proteins, MORC6-like proteins, SUVR2-like proteins, DRD1-like proteins, RDM1 like proteins, DRM3-like proteins, DRM2-like proteins, and/or FRG-like proteins are fusion proteins that have been engineered to specifically bind different DNA sequences via the introduction of a heterologous DNA-binding domain into the epigenetic regulator protein. Further, in some embodiments, SHH1-like proteins, SHH2-like proteins, AGO4-like proteins, HDA6-like proteins, NRPD1-like proteins, NRPE1-like proteins, JMJ14-like proteins, RDR2-like proteins, NRPD2A/NRPE2-like proteins, NRPB3/NRPD3/NRPE3A-like proteins, NRPE3B-like proteins, NRPB11/NRPD11/NRPE11-like proteins, NRPB10/NRPD10/NRPE10-like proteins, NRPB2/NRPD12/NRPE12-like proteins, NRPB6A/NRPD6A/NRPE6A-like proteins, NRPB6B/NRPD6B/NRPE6B-like proteins, NRPB8A/NRPE8A-like proteins, NRPB8B/NRPD8B/NRPE8B-like proteins, NRPE5-like proteins, NRPD4/NRPE4-like proteins, NRPE7-like proteins, NRPD7-like proteins, NRPB5/NRPD5-like proteins, NRPB9A/NRPD9A/NRPE9A-like proteins, NRPB9B/NRPD9B/NRPE9B-like proteins, ATRX-like proteins, MOM1-like proteins, MORC1-like proteins, SssI-like proteins, DRM2-MTase-like proteins, DNMT3A-like proteins, DNMT3L-like proteins, MBD9-like proteins, SUVH2-like proteins, SUVH9-like proteins, DMS3-like proteins, MORC6-like proteins, SUVR2-like proteins, DRD1-like proteins, RDM1 like proteins, DRM3-like proteins, DRM2-like proteins, and/or FRG-like proteins are fusion proteins that are able to target and silence a specific nucleic acid with the use of an engineered CRISPR-CAS9 targeting system. The respective SHH1 protein, SHH2 protein, AGO4 protein, HDA6 protein, NRPD1 protein, NRPE1 protein, JMJ14 protein, RDR2 protein, NRPD2A/NRPE2 protein, NRPB3/NRPD3/NRPE3A protein, NRPE3B protein, NRPB11/NRPD11/NRPE11 protein, NRPB10/NRPD10/NRPE10 protein, NRPB12/NRPD12/NRPE12 protein, NRPB6A/NRPD6A/NRPE6A protein, NRPB6B/NRPD6B/NRPE6B protein, NRPB8A/NRPE8A protein, NRPB8B/NRPD8B/NRPE8B protein, NRPE5 protein, NRPD4/NRPE4 protein, NRPE7 protein, NRPD7 protein, NRPB5/NRPD5 protein, NRPB9A/NRPD9A/NRPE9A protein, NRPB9B/NRPD9B/NRPE9B protein, ATRX protein, MOM1 protein, MORC1 protein, SssI protein, DRM2-MTase protein, DNMT3A protein, DNMT3L protein, MBD9 protein, SUVH2 protein, SUVH9 protein, DMS3 protein, MORC6 protein, SUVR2 protein, DRD1 protein, RDM1 protein, DRM3 protein, DRM2 protein, and/or FRG protein portion of the corresponding epigenetic regulator-like protein may be present in various N-terminal or C-terminal orientations relative to the heterologous coding sequence.

[0078] Epigenetic regulators of the present disclosure such as, for example, any one of SHH1-like proteins, SHH2-like proteins, AGO4-like proteins, HDA6-like proteins, NRPD1-like proteins, NRPE1-like proteins, JMJ14-like proteins, RDR2-like proteins, NRPD2A/NRPE2-like proteins, NRPB3/NRPD3/NRPE3A-like proteins, NRPE3B-like proteins, NRPB11/NRPD11/NRPE11-like proteins, NRPB10/NRPD10/NRPE10-like proteins, NRPB12/NRPD12/NRPE12-like proteins, NRPB6A/NRPD6A/NRPE6A-like proteins, NRPB6B/NRPD6B/NRPE6B-like proteins, NRPB8A/NRPE8A-like proteins, NRPB8B/NRPD8B/NRPE8B-like proteins, NRPE5-like proteins, NRPD4/NRPE4-like proteins, NRPE7-like proteins, NRPD7-like proteins, NRPB5/NRPD5-like proteins, NRPB9A/NRPD9A/NRPE9A-like proteins, NRPB9B/NRPD9B/NRPE9B-like proteins, ATRX-like proteins, MOM1-like proteins, MORC1-like proteins, SssI-like proteins, DRM2-MTase-like proteins, DNMT3A-like proteins, DNMT3L-like proteins, MBD9-like proteins, SUVH2-like proteins, SUVH9-like proteins, DMS3-like proteins, MORC6-like proteins, SUVR2-like proteins, DRD1-like proteins, RDM1 like proteins, DRM3-like proteins, DRM2-like proteins, and/or FRG-like proteins may be combined and expressed in a host cell in various combinations.

[0079] In some embodiments, a JMJ14-like protein and an HDA6-like protein as described herein may be expressed in a host cell. In some embodiments, an SHH1-like protein, a DMS3-like protein, an HDA6-like protein, and a JMJ14-like protein may all be expressed in a host cell.

### DNA-Binding Domains

[0080] Certain aspects of the present disclosure relate to epigenetic regulator-like proteins such as, for example, SHH1-like proteins, SHH2-like proteins, AGO4-like proteins, HDA6-like proteins, NRPD1-like proteins, NRPE1-like proteins, JMJ14-like proteins, RDR2-like proteins, NRPD2A/NRPE2-like proteins, NRPB3/NRPD3/NRPE3A-like proteins, NRPE3B-like proteins, NRPB11/NRPD11/NRPE11-like proteins, NRPB10/NRPD10/NRPE10-like proteins, NRPB12/NRPD12/NRPE12-like proteins, NRPB6A/NRPD6A/NRPE6A-like proteins, NRPB6B/NRPD6B/NRPE6B-like proteins, NRPB8A/NRPE8A-like proteins, NRPB8B/NRPD8B/NRPE8B-like proteins, NRPE5-like proteins, NRPD4/NRPE4-like proteins, NRPE7-like proteins, NRPD7-like proteins, NRPB5/NRPD5-like proteins, NRPB9A/NRPD9A/NRPE9A-like proteins, NRPB9B/NRPD9B/NRPE9B-like proteins, ATRX-like proteins, MOM1-like proteins, MORC1-like proteins, SssI-like proteins, DRM2-MTase-like proteins, DNMT3A-like proteins, DNMT3L-like proteins, MBD9-like proteins, SUVH2-like proteins, SUVH9-like proteins, DMS3-like proteins, MORC6-like proteins, SUVR2-like proteins, DRD1-like proteins, RDM1 like proteins, DRM3-like proteins, DRM2-like proteins, and/or FRG-like proteins of the present disclosure, that have DNA-binding activity. In some embodiments, this DNA-binding activity is achieved through a heterologous DNA-binding domain (e.g. binds with a sequence affinity other than that of a DNA-binding domain that may be present in the endogenous protein). In some embodiments, recombinant proteins of the present disclosure contain a DNA-binding domain. Recombinant proteins of the present disclosure may contain one DNA binding domain or they may contain more than one DNA-binding domain. Heterologous DNA-binding domains may be recombinantly fused to an epigenetic regulator of the present disclosure such that the epigenetic regulator is then targeted to a specific nucleic acid sequence and can induce silencing of the specific nucleic acid sequence.

[0081] In some embodiments, the DNA-binding domain is a zinc finger domain. A zinc finger domain generally refers to a DNA-binding protein domain that contains zinc fingers, which are small protein structural motifs that can coordinate one or more zinc ions to help stabilize their protein folding. Zinc fingers were first identified as DNA-binding motifs (Miller et al., 1985), and numerous other variations of them have been characterized. Recent progress has been made that allows the engineering of DNA-binding proteins that specifically recognize any desired DNA sequence. For example, it was shown that a three-finger zinc finger protein could be constructed to block the expression of a human oncogene that was transformed into a mouse cell line (Choo and Klug, 1994).

[0082] Zinc fingers can generally be classified into several different structural families and typically function as interaction modules that bind DNA, RNA, proteins, or small molecules. Suitable zinc finger domains of the present disclosure may contain two, three, four, five, six, seven, eight, or nine zinc fingers. Examples of suitable zinc finger domains may include, for example, Cys2His2 (C2H2) zinc finger domains, C-x8-C-x5-C-x3-H (CCCH) zinc finger domains, multi-cysteine zinc finger domains, and zinc binuclear cluster domains.

[0083] In some embodiments, the DNA-binding domain binds a specific nucleic acid sequence. For example, the DNA-binding domain may bind a sequence that is at least 5 nucleotides, at least 6 nucleotides, at least 7 nucleotides, at least 8 nucleotides, at least 9 nucleotides, at least 10 nucleotides, at least 11 nucleotides, at least 12 nucleotides, at least 13 nucleotides, at least 14 nucleotides, at least 15 nucleotides, at least 20 nucleotides, at least 25 nucleotides, at least 30 nucleotides, at least 35 nucleotides, at least 40 nucleotides, at least 45 nucleotides, at least 50 nucleotides, or a high number of nucleotides in length.

[0084] In some embodiments, a recombinant protein of the present disclosure further contains two N-terminal CCCH zinc finger domains.

[0085] In some embodiments, the zinc finger domain is an engineered zinc finger array, such as a C2H2 zinc finger array. Engineered arrays of C2H2 zinc fingers can be used to create DNA-binding proteins capable of targeting desired genomic DNA sequences. Methods of engineering zinc finger arrays are well known in the art, and include, for example, combining smaller zinc fingers of known specificity.

[0086] In some embodiments, recombinant proteins of the present disclosure may contain a DNA-binding domain other than a zinc finger domain. Examples of such DNA-binding domains may include, for example, TAL (transcription activator-like) effector targeting domains, helix-turn-helix family DNA-binding domains, basic domains, ribbon-helix-helix domains, TBP (TATA-box binding protein) domains, barrel dimer domains, RHB domains (real homology domain), BAH (bromo-adjacent homology) domains, SANT domains, Chromodomains, Tudor domains, Bromodomains, PHD domains (plant homeo domain), WD40 domains, and MBD domains (methyl-CpG-binding domain).

[0087] In some embodiments, the DNA-binding domain is a TAL effector targeting domain. TAL effectors generally refer to secreted bacterial proteins, such as those secreted by Xanthomonas or Ralstonia bacteria when infecting various plant species. Generally, TAL effectors are capable of binding promoter sequences in the host plant, and activate the expression of plant genes that aid in bacterial infection. TAL effectors recognize plant DNA sequences through a central repeat targeting domain that contains a variable number of approximately 34 amino acid repeats. Moreover, TAL effector targeting domains can be engineered to target specific DNA sequences. Methods of modifying TAL effector targeting domains are well known in the art, and described in Bogdanove and Voytas, Science. 2011 Sep. 30; 333(6051):1843-6.

[0088] Other DNA-binding domains for use in the methods and compositions of the present disclosure will be readily apparent to one of skill in the art, in view of the present disclosure.

### CRISPR-CAS9

[0089] Certain methods of the present disclosure relate to using a CRISPR-CAS9 targeting system to target an epigenetic regulator to a target nucleic acid and induce silencing of the target nucleic acid.

[0090] CRISPR systems naturally use small base-pairing guide RNAs to target and cleave foreign DNA elements in a sequence-specific manner (Wiedenheft et al., 2012). There are diverse CRISPR systems in different organisms that may be used to target proteins of the present disclosure to a target nucleic acid. One of the simplest systems is the type II CRISPR system from Streptococcus pyogenes. Only a single gene encoding the CAS9 protein and two RNAs, a mature CRISPR RNA (crRNA) and a partially complementary trans-acting RNA (tracrRNA), are necessary and sufficient for RNA-guided silencing of foreign DNAs (Jinek et al., 2012). Maturation of crRNA requires tracrRNA and RNase III (Deltcheva et al., 2011). However, this requirement can be bypassed by using an engineered small guide RNA (gRNA) containing a designed hairpin that mimics the tracrRNA-crRNA complex (Jinek et al., 2012). Base pairing between the gRNA and target DNA normally causes double-strand breaks (DSBs) due to the endonuclease activity of CAS9.

[0091] It is known that the endonuclease domains of the CAS9 protein can be mutated to create a programmable RNA-dependent DNA-binding protein (dCAS9) (Qi et al., 2013). The fact that duplex gRNA-dCAS9 binds target sequences without endonuclease activity has been used to tether regulatory proteins, such as transcriptional activators or repressors, to promoter regions in order to modify gene expression (Gilbert et al., 2013), and CAS9 transcriptional activators have been used for target specificity screening and paired nickases for cooperative genome engineering (Mali et al., 2013, Nature Biotechnology 31:833-838). Thus, dCAS9 may be used as a modular RNA-guided platform to recruit different proteins to DNA in a highly specific manner. One of skill in the art would recognize other RNA-guided DNA binding protein/RNA complexes that can be used equivalently to CRISPR-CAS9.

[0092] The CRISPR-CAS9 system may be used to target an epigenetic regulator of the present disclosure such as, for example, one or more of an SHH1 protein, an SHH2 protein, an AGO4 protein, an HDA6 protein, an NRPD1 protein, an NRPE1 protein, a JMJ14 protein, an RDR2 protein, an NRPD2A/NRPE2 protein, an NRPB3/NRPD3/NRPE3A protein, an NRPE3B protein, an NRPB11/NRPD11/NRPE11 protein, an NRPB10/NRPD10/NRPE10 protein, an NRPB12/NRPD12/NRPE12 protein, an NRPB6A/NRPD6A/NRPE6A protein, an NRPB6B/NRPD6B/NRPE6B protein, an NRPB8A/NRPE8A protein, an NRPB8B/NRPD8B/NRPE8B protein, an NRPE5 protein, an NRPD4/NRPE4 protein, an NRPE7 protein, an NRPD7 protein, an NRPB5/NRPD5 protein, an NRPB9A/NRPD9A/NRPE9A protein, an NRPB9B/NRPD9B/NRPE9B protein, an ATRX protein, a MOM1 protein, a MORC1 protein, an SssI protein, a DRM2-MTase protein, a DNMT3A protein, a DNMT3L protein, a MBD9 protein, a SUVH2 protein, a SUVH9 protein, a DMS3 protein, a MORC6 protein, a SUVR2 protein, a DRD1 protein, an RDM1 protein, a DRM3 protein, a DRM2 protein, and/or an FRG protein to a specific nucleic acid.

[0093] Targeting using CRISPR-CAS9 may be beneficial over other genome targeting techniques in certain instances. For example, one need only change the guide RNAs in order to target fusion proteins to a new genomic location, or even multiple locations simultaneously. Further, CAS9-mediated targeting has been shown to be insensitive to the methylation state of the target nucleic acid (Nature Biotechnology 31, 827-832 (2013)). In addition, guide RNAs can be extended to include sites for binding to proteins, such as the MS2 protein, which can be fused to proteins of interest.

[0094] CAS9 Proteins

[0095] A variety of CAS9 proteins may be used in the methods of the present disclosure. There are several CAS9 genes present in different bacteria species (Esvelt, K et al, 2013, Nature Methods). One of the most characterized CAS9 proteins is the CAS9 protein from S. pyogenes that, in order to be active, needs to bind a gRNA with a specific sequence and the presence of a PAM motif (NGG, where N is any nucleotide) at the 3′ end of the target locus. However, other CAS9 proteins from different bacterial species show differences in 1) the sequence of the gRNA they can bind and 2) the sequence of the PAM motif. Therefore, it is possible that other CAS9 proteins such as, for example, those from Streptococcus thermophilus or N. meningitidis may also be utilized herein. Indeed, these two CAS9 proteins have a smaller size (around 1100 amino acids) as compared to S. pyogenes CAS9 (1400 amino acids), which may confer some advantages during cloning or protein expression.

[0096] CAS9 proteins from a variety of bacteria have been used successfully in engineered CRISPR-CAS9 systems. There are also versions of CAS9 proteins available in which the codon usage has been more highly optimized for expression in eukaryotic systems, such as human codon optimized CAS9 (Cell, 152:1173-1183) and plant optimized CAS9 (Nature Biotechnology, 31:688-691).

[0097] CAS9 proteins may also be modified for various purposes. For example, CAS9 proteins may be engineered to contain a nuclear-localization sequence (NLS). CAS9 proteins may be engineered to contain an NLS at the N-terminus of the protein, at the C-terminus of the protein, or at both the N- and C-terminus of the protein. Engineering a CAS9 protein to contain an NLS may assist with directing the protein to the nucleus of a host cell. CAS9 proteins may be engineered such that they are unable to cleave nucleic acids (e.g. nuclease-deficient dCAS9 polypeptides). One of skill in the art would be able to readily identify a suitable CAS9 protein for use in the methods and compositions of the present disclosure.

[0098] Exemplary CAS9 proteins that may be used in the methods and compositions of the present disclosure may include, for example, a CAS9 protein having the amino acid sequence of any one of SEQ ID NO: 401, SEQ ID NO: 402, and/or SEQ ID NO: 403, homologs thereof, and fragments thereof.

[0099] In some embodiments, a CAS9 polypeptide or fragment thereof of the present disclosure has an amino acid sequence with at least about 20%, at least about 25%, at least about 30%, at least about 40%, at least about 50%, at least about 55%, at least about 60%, at least about 65%, at least about 70%, at least about 75%, at least about 80%, at least about 85%, at least about 90%, at least about 91%, at least about 92%, at least about 93%, at least about 94%, at least about 95%, at least about 96%, at least about 97%, at least about 98%, at least about 99%, or at least about 100% amino acid identity to the amino acid sequence of SEQ ID NO: 401, SEQ ID NO: 402, or SEQ ID NO: 403. In some embodiments, the CAS9 polypeptide does not have nuclease activity and is unable to cleave a nucleic acid molecule (e.g. dCAS9 polypeptide).

[0100] CRISPR RNAs

[0101] The CRISPR RNA (crRNA) of the present disclosure may take a variety of forms. As described above, the sequence of the crRNA is involved in conferring specificity to targeting a specific nucleic acid.

[0102] Many different crRNA molecules can be designed to target many different sequences.

[0103] With respect to targeting, target nucleic acids generally require the PAM sequence, NGG, at the end of the 20 base pair target sequence. crRNAs of the present disclosure may be expressed as a single crRNA molecule, or they may be expressed in the form of a crRNA/tracrRNA hybrid molecule where the crRNA and the tracrRNA have been fused together, forming a guide RNA (gRNA). crRNA molecules and/or guide RNA molecules may be extended to include sites for the binding of RNA binding proteins.

[0104] Multiple crRNAs and/or guide RNAs can be encoded into a single CRISPR array to enable simultaneous targeting to several sites (Science 2013: Vol. pp. 819-823). For example, the tracrRNA may be expressed separately, and two adjacent target sequences may be encoded in a pre-crRNA array interspaced with repeats.

[0105] A variety of promoters may be used to drive expression of the crRNA and/or the guide RNA. crRNAs and/or guide RNAs may be expressed using a Pol III promoter such as, for example, the U6 promoter or the H1 promoter (eLife 2013 2:e00471). For example, an approach in plants has been described using three different Pol III promoters from three different Arabidopsis U6 genes, and their corresponding gene terminators (BMC Plant Biology 2014 14:327). One skilled in the art would readily understand that many additional Pol III promoters could be utilized to simultaneously express many crRNAs and/or guide RNAs to many different locations in the genome simultaneously. The use of different Pol III promoters for each crRNA and/or gRNA expression cassette may be desirable to reduce the chances of natural gene silencing that can occur when multiple copies of identical sequences are expressed in plants. In addition, crRNAs and/or guide RNAs can be modified to improve the efficiency of their function in guiding CAS9 to a target nucleic acid. For example, it has been shown that adding either 8 or 20 additional nucleotides to the gRNA in order to extend the hairpin by 4 or 10 base pairs resulted in more efficient CAS9 activity (eLife 2013 2:e00471).

[0106] Alternatively, a tRNA-gRNA expression cassette (Xie, X et al, 2015, Proc Natl Acad Sci USA. 2015 Mar. 17; 112(11):3570-5) may be used to deliver multiple gRNAs simultaneously with high expression levels.

[0107] Trans-Activating CRISPR RNAs

[0108] The trans-activating CRISPR RNA (tracrRNA) of the present disclosure may take a variety of forms, as will be readily understood by one of skill in the art. As described above, tracrRNAs are involved in the maturation of a crRNA. tracrRNAs of the present disclosure may be expressed as a single tracrRNA molecule, or they may be expressed in the form of a crRNA/tracrRNA hybrid molecule where the crRNA and the tracrRNA have been fused together, forming a guide RNA (gRNA). tracrRNA molecules and/or guide RNA molecules may be extended to include sites for the binding of RNA binding proteins.

[0109] As CRISPR systems naturally exist in a variety of bacteria, the framework of the crRNA and tracrRNA in these bacteria may be adapted for use in the methods and compositions described herein. crRNAs, tracrRNAs, and/or guide RNAs of the present disclosure may be constructed based on the framework of one or more of these molecules in, for example, S. pyogenes, Streptococcus thermophilus, and/or N. meningitidis. For example, a guide RNA of the present disclosure may be constructed based on the framework of the crRNA and tracrRNA from S. pyogenes (SEQ ID NO: 404), Streptococcus thermophilus (SEQ ID NO: 405), and/or N. meningitidis (SEQ ID NO: 406). In these exemplary frameworks, the 5′ end of the sequence contains 20 generic nucleotides (N) that correspond to the crRNA targeting sequence. This sequence will vary depending on the sequence of the particular nucleic acid being targeted.

[0110] Linkers

[0111] Various linkers may be used in the construction of recombinant proteins as described herein. In general, linkers are short peptides that separate the different domains in a multi-domain protein. They may play an important role in fusion proteins, affecting the crosstalk between the different domains, the yield of protein production, and the stability and/or the activity of the fusion proteins. Linkers are generally classified into 2 major categories: flexible or rigid. Flexible linkers are typically used when the fused domains require a certain degree of movement or interaction, and these linkers are usually composed of small amino acids such as, for example, glycine (G), serine (S) or proline (P).

[0112] The certain degree of movement between domains allowed by flexible linkers is an advantage in some fusion proteins. However, it has been reported that flexible linkers can sometimes reduce protein activity due to an inefficient separation of the two domains. In this case, rigid linkers may be used since they enforce a fixed distance between domains and promote their independent functions. A thorough description of several linkers has been provided in Chen X et al., 2013, Advanced Drug Delivery Reviews 65 (2013) 1357-1369).

[0113] Various linkers may be used in, for example, the construction of recombinant epigenetic regulators that are fused to a CAS9 protein as described herein. Linkers may be used in the epigenetic regulator-CAS9 fusion proteins described herein to separate the coding sequences of an epigenetic regulator of the present disclosure and a CAS9 protein. For example, a variety of wiggly/flexible linkers, stiff/rigid linkers, short linkers, and long linkers may be used as described herein. Various linkers as described herein may be used in the construction of one or more SHH1-like proteins, SHH2-like proteins, AGO4-like proteins, HDA6-like proteins, NRPD1-like proteins, NRPE1-like proteins, JMJ14-like proteins, RDR2-like proteins, NRPD2A/NRPE2-like proteins, NRPB3/NRPD3/NRPE3A-like proteins, NRPE3B-like proteins, NRPB11/NRPD11/NRPE11-like proteins, NRPB10/NRPD10/NRPE10-like proteins, NRPB12/NRPD12/NRPE12-like proteins, NRPB6A/NRPD6A/NRPE6A-like proteins, NRPB6B/NRPD6B/NRPE6B-like proteins, NRPB8A/NRPE8A-like proteins, NRPB8B/NRPD8B/NRPE8B-like proteins, NRPE5-like proteins, NRPD4/NRPE4-like proteins, NRPE7-like proteins, NRPD7-like proteins, NRPB5/NRPD5-like proteins, NRPB9A/NRPD9A/NRPE9A-like proteins, NRPB9B/NRPD9B/NRPE9B-like proteins, ATRX-like proteins, MOM1-like proteins, MORC1-like proteins, SssI-like proteins, DRM2-MTase-like proteins, DNMT3A-like proteins, DNMT3L-like proteins, MBD9-like proteins, SUVH2-like proteins, SUVH9-like proteins, DMS3-like proteins, MORC6-like proteins, SUVR2-like proteins, DRD1-like proteins, RDM1 like proteins, DRM3-like proteins, DRM2-like proteins, and/or FRG-like proteins as described herein. Linkers may also be used in other recombinant polypeptides as described herein (e.g. recombinant polypeptides in a SunTag system).

[0114] A variety of shorter or longer linker regions are known in the art, for example corresponding to a series of glycine residues, a series of adjacent glycine-serine dipeptides, a series of adjacent glycine-glycine-serine tripeptides, or known linkers from other proteins. A flexible linker may include, for example, the amino acid sequence: SSGPPPGTG and variants thereof. A rigid linker may include, for example, the amino acid sequence: AEAAAKEAAAKA (SEQ ID NO: 863) and variants thereof. The XTEN linker, SGSETPGTSESATPES (SEQ ID NO: 864), and variants thereof, described in Guilinget et al, 2014 (Nature Biotechnology 32, 577-582), may also be used. This particular linker was previously shown to produce the best results among other linkers in a protein fusion between dCAS9 and the nuclease FokI.

[0115] Variations of CRISPR-CAS9 Targeting

[0116] Certain aspects of the present disclosure relate to recombinantly fusing a polypeptide of the present disclosure such as, for example, an SHH1 protein, an SHH2 protein, an AGO4 protein, an HDA6 protein, an NRPD1 protein, an NRPE1 protein, a JMJ14 protein, an RDR2 protein, an NRPD2A/NRPE2 protein, an NRPB3/NRPD3/NRPE3A protein, an NRPE3B protein, an NRPB11/NRPD11/NRPE11 protein, an NRPB10/NRPD10/NRPE10 protein, an NRPB12/NRPD12/NRPE12 protein, an NRPB6A/NRPD6A/NRPE6A protein, an NRPB6B/NRPD6B/NRPE6B protein, an NRPB8A/NRPE8A protein, an NRPB8B/NRPD8B/NRPE8B protein, an NRPE5 protein, an NRPD4/NRPE4 protein, an NRPE7 protein, an NRPD7 protein, an NRPB5/NRPD5 protein, an NRPB9A/NRPD9A/NRPE9A protein, an NRPB9B/NRPD9B/NRPE9B protein, an ATRX protein, a MOM1 protein, a MORC1 protein, an SssI protein, a DRM2-MTase protein, a DNMT3A protein, a DNMT3L protein, a MBD9 protein, a SUVH2 protein, a SUVH9 protein, a DMS3 protein, a MORC6 protein, a SUVR2 protein, a DRD1 protein, a RDM1 protein, a DRM3 protein, a DRM2 protein, and/or a FRG protein to a CAS9 protein. However, CRISPR-CAS9 targeting schemes as described herein to target a specific nucleic acid may also involve schemes where a polypeptide of the present disclosure is targeted to a specific nucleic acid without being recombinantly fused to a CAS9 protein.

[0117] The use of recombinant proteins containing an epigenetic regulator recombinantly fused to an RNA-binding protein may be used in targeting of the epigenetic regulator to a specific nucleic acid via CRISPR-CAS9 targeting. In some embodiments, an SHH1 protein, an SHH2 protein, an AGO4 protein, an HDA6 protein, an NRPD1 protein, an NRPE1 protein, a JMJ14 protein, an RDR2 protein, an NRPD2A/NRPE2 protein, an NRPB3/NRPD3/NRPE3A protein, an NRPE3B protein, an NRPB11/NRPD11/NRPE11 protein, an NRPB10/NRPD10/NRPE10 protein, an NRPB12/NRPD12/NRPE12 protein, an NRPB6A/NRPD6A/NRPE6A protein, an NRPB6B/NRPD6B/NRPE6B protein, an NRPB8A/NRPE8A protein, an NRPB8B/NRPD8B/NRPE8B protein, an NRPE5 protein, an NRPD4/NRPE4 protein, an NRPE7 protein, an NRPD7 protein, an NRPB5/NRPD5 protein, an NRPB9A/NRPD9A/NRPE9A protein, an NRPB9B/NRPD9B/NRPE9B protein, an ATRX protein, a MOM1 protein, a MORC1 protein, an SssI protein, a DRM2-MTase protein, a DNMT3A protein, a DNMT3L protein, a MBD9 protein, a SUVH2 protein, a SUVH9 protein, a DMS3 protein, a MORC6 protein, a SUVR2 protein, a DRD1 protein, a RDM1 protein, a DRM3 protein, a DRM2 protein, and/or a FRG protein is recombinantly fused to an MS2 coat protein such that these fusion proteins may be directed to a target nucleic acid with the assistance of a CAS9 protein. Various MS2 coat proteins may be used, such as SEQ ID NO: 407 and homologs thereof. This targeting scheme is further described herein and will be readily understood by one of skill in the art in view of the present disclosure.

[0118] In addition to fusing an epigenetic regulator to an MS2 coat protein, other RNA-binding proteins may also be used in this targeting scheme. For example, the proteins PP7 and COM (Zalatan et al., Cell 160, 339-350), may also be recombinantly fused to an SHH1 protein, an SHH2 protein, an AGO4 protein, an HDA6 protein, an NRPD1 protein, an NRPE1 protein, a JMJ14 protein, an NRPD2A/NRPE2 protein, an NRPB3/NRPD3/NRPE3A protein, an NRPE3B protein, an NRPB11/NRPD11/NRPE11 protein, an NRPB10/NRPD10/NRPE10 protein, an NRPB12/NRPD12/NRPE12 protein, an NRPB6A/NRPD6A/NRPE6A protein, an NRPB6B/NRPD6B/NRPE6B protein, an NRPB8A/NRPE8A protein, an NRPB8B/NRPD8B/NRPE8B protein, an NRPE5 protein, an NRPD4/NRPE4 protein, an NRPE7 protein, an NRPD7 protein, an NRPB5/NRPD5 protein, an NRPB9A/NRPD9A/NRPE9A protein, an NRPB9B/NRPD9B/NRPE9B protein, an ATRX protein, a MOM1 protein, a MORC1 protein, an SssI protein, a DRM2-MTase protein, a DNMT3A protein, a DNMT3L protein, a MBD9 protein, a SUVH2 protein, a SUVH9 protein, a DMS3 protein, a MORC6 protein, a SUVR2 protein, a DRD1 protein, a RDM1 protein, a DRM3 protein, a DRM2 protein, and/or a FRG protein such that these fusion proteins may be directed to a target nucleic acid with the assistance of a CAS9 protein.

[0119] The use of recombinant proteins containing an epigenetic regulator recombinantly fused to an antibody or fragment thereof may be used in targeting of the epigenetic regulator to a specific nucleic acid via CRISPR-CAS9 targeting. In some embodiments, an SHH1 protein, an SHH2 protein, an AGO4 protein, an HDA6 protein, an NRPD1 protein, an NRPE1 protein, a JMJ14 protein, an RDR2 protein, an NRPD2A/NRPE2 protein, an NRPB3/NRPD3/NRPE3A protein, an NRPE3B protein, an NRPB11/NRPD11/NRPE11 protein, an NRPB10/NRPD10/NRPE10 protein, an NRPB12/NRPD12/NRPE12 protein, an NRPB6A/NRPD6A/NRPE6A protein, an NRPB6B/NRPD6B/NRPE6B protein, an NRPB8A/NRPE8A protein, an NRPB8B/NRPD8B/NRPE8B protein, an NRPE5 protein, an NRPD4/NRPE4 protein, an NRPE7 protein, an NRPD7 protein, an NRPB5/NRPD5 protein, an NRPB9A/NRPD9A/NRPE9A protein, an NRPB9B/NRPD9B/NRPE9B protein, an ATRX protein, a MOM1 protein, a MORC1 protein, an SssI protein, a DRM2-MTase protein, a DNMT3A protein, a DNMT3L protein, a MBD9 protein, a SUVH2 protein, a SUVH9 protein, a DMS3 protein, a MORC6 protein, a SUVR2 protein, a DRD1 protein, an RDM1 protein, a DRM3 protein, a DRM2 protein, and/or an FRG protein is recombinantly fused to an scFV antibody such that these fusion proteins may be directed to a target nucleic acid with the assistance of a CAS9 protein. Various scFV antibodies may be used, such as SEQ ID NO: 408 and homologs thereof. This targeting scheme is further described herein and will be readily understood by one of skill in the art in view of the present disclosure.

[0120] Similar systems using antibody mimetic proteins or proteins which can bind other proteins may also be used in the methods described herein. For example, designed ankyrin repeat proteins (DARPins), which are small and highly stable proteins that can bind their epitopes with strong affinity (Binz et al., 2004, Nat. Biotechnol. 22, 575-582), may be recombinantly fused to an SHH1 protein, an SHH2 protein, an AGO4 protein, an HDA6 protein, an NRPD1 protein, an NRPE1 protein, a JMJ14 protein, an RDR2 protein, an NRPD2A/NRPE2 protein, an NRPB3/NRPD3/NRPE3A protein, an NRPE3B protein, an NRPB11/NRPD11/NRPE11 protein, an NRPB10/NRPD10/NRPE10 protein, an NRPB12/NRPD12/NRPE12 protein, an NRPB6A/NRPD6A/NRPE6A protein, an NRPB6B/NRPD6B/NRPE6B protein, an NRPB8A/NRPE8A protein, an NRPB8B/NRPD8B/NRPE8B protein, an NRPE5 protein, an NRPD4/NRPE4 protein, an NRPE7 protein, an NRPD7 protein, an NRPB5/NRPD5 protein, an NRPB9A/NRPD9A/NRPE9A protein, an NRPB9B/NRPD9B/NRPE9B protein, an ATRX protein, a MOM1 protein, a MORC1 protein, an SssI protein, a DRM2-MTase protein, a DNMT3A protein, a DNMT3L protein, a MBD9 protein, a SUVH2 protein, a SUVH9 protein, a DMS3 protein, a MORC6 protein, a SUVR2 protein, a DRD1 protein, an RDM1 protein, a DRM3 protein, a DRM2 protein, and/or an FRG protein such that these fusion proteins may be directed to a target nucleic acid with the assistance of a CAS9 protein.

### SunTag Systems

[0121] Certain aspects of the present disclosure relate to the use of SunTag systems for targeting (using CRISPR-based targeting) an epigenetic regulator of the present disclosure to a target nucleic acid. A synthetic system was previously developed for use in mammals for recruiting multiple copies of a protein to a target polypeptide chain, and this system was called a SunTag system (Tanenbaum et al., 2014)(WO2016011070). This system was also adapted so that the multiple copies of the protein using the SunTag system could be targeted to a nucleic acid using the CRISPR-Cas9 system (Tanenbaum et al., 2014). However, this system was developed for use in mammals. Provided herein are methods and compositions for SunTag systems adapted to target epigenetic regulators to specific loci in plants.

[0122] Accordingly, the present disclosure provides methods and compositions for the recruitment of multiple copies of an epigenetic regulator (e.g. DRM2-MTase, DNMT3A, DNMT3L, DNMT3A-DNMT3L polypeptide fusions) to a target nucleic acid in plants via CRISPR-based targeting in a manner that allows for methylation and/or silencing of the target nucleic acid. In certain aspects, this specific targeting involves the use of a system that includes (1) a nuclease-deficient CAS9 polypeptide that is recombinantly fused to a multimerized epitope, (2) an epigenetic regulator polypeptide (e.g. DRM2-MTase, DNMT3A, DNMT3L, DNMT3A-DNMT3L polypeptide fusions) that is recombinantly fused to an affinity polypeptide, and (3) a guide RNA (gRNA). In this aspect, the dCAS9 portion of the dCAS9-multimerized epitope fusion protein is involved with targeting a target nucleic acid as directed by the guide RNA. The multimerized epitope portion of the dCAS9-multimerized epitope fusion protein is involved with binding to the affinity polypeptide (which is recombinantly fused to an epigenetic regulator). The affinity polypeptide portion of the epigenetic regulator-affinity polypeptide fusion protein is involved with binding to the multimerized epitope so that the epigenetic regulator can be in association with dCAS9. The epigenetic regulator portion of the epigenetic regulator-affinity polypeptide fusion protein is involved with inducing methylation and/or silencing of a target nucleic acid, once the complex has been targeted to a target nucleic acid via the guide RNA.

[0123] As described above, SunTag systems involve targeting based on CRISPR-CAS9 systems. CRISPR-CAS9 systems are described above. The features of CRISPR-CAS9 systems may be used in SunTag systems of the present disclosure as appropriate, as will be readily understood by one of skill in the art.

[0124] Affinity Polypeptides

[0125] Certain aspects of the present disclosure relate to recombinant polypeptides that contain an affinity polypeptide. Affinity polypeptides of the present disclosure may bind to one or more epitopes (e.g. a multimerized epitope). In some embodiments, an affinity polypeptide is present in a recombinant polypeptide that contains an epigenetic regulator polypeptide (e.g. DRM2-MTase, DNMT3A, DNMT3L, DNMT3A-DNMT3L polypeptide fusions) and an affinity polypeptide.

[0126] A variety of affinity polypeptides are known in the art and may be used herein. Generally, the affinity polypeptide should be stable in the conditions present in the intracellular environment of a plant cell. Additionally, the affinity polypeptide should specifically bind to its corresponding epitope with minimal cross-reactivity.

[0127] The affinity polypeptide may be an antibody such as, for example, an scFv. The antibody may be optimized for stability in the plant intracellular environment. When a GCN4 epitope is used in the methods described herein, a suitable affinity polypeptide that is an antibody may contain an anti-GCN4 scFv domain.

[0128] In embodiments where the affinity polypeptide is an scFv antibody, the polypeptide may contain an amino acid sequence with at least about 20%, at least about 25%, at least about 30%, at least about 40%, at least about 50%, at least about 55%, at least about 60%, at least about 65%, at least about 70%, at least about 75%, at least about 80%, at least about 85%, at least about 90%, at least about 91%, at least about 92%, at least about 93%, at least about 94%, at least about 95%, at least about 96%, at least about 97%, at least about 98%, at least about 99%, or at least about 100% amino acid identity to the amino acid sequence of SEQ ID NO: 793.

[0129] Other exemplary affinity polypeptides include, for example, proteins with SH2 domains or the domain itself, 14-3-3 proteins, proteins with SH3 domains or the domain itself, the Alpha-Syntrophin PDZ protein interaction domain, the PDZ signal sequence, or proteins from plants which can recognize AGO hook motifs (e.g. AGO4 from Arabidopsis thaliana).

[0130] Additional affinity polypeptides that may be used in the methods and compositions described herein will be readily apparent to those of skill in the art.

[0131] Epitopes and Multimerized Epitopes

[0132] Certain aspects of the present disclosure relate to recombinant polypeptides that contain an epitope or a multimerized epitope. Epitopes of the present disclosure may bind to an affinity polypeptide. In some embodiments, an epitope or multimerized epitope is present in a recombinant polypeptide that contains dCAS9 polypeptide.

[0133] Epitopes of the present disclosure may be used for recruiting affinity polypeptides (and any polypeptides they may be recombinantly fused to) to a dCAS9 polypeptide. In embodiments where a dCAS9 polypeptide is fused to an epitope or a multimerized epitope, the dCAS9 polypeptide may be fused to one copy of an epitope, multiple copies of an epitope, more than one different epitope, or multiple copies of more than one different epitope as further described herein.

[0134] A variety of epitopes and multimerized epitopes are known in the art and may be used herein. In general, the epitope or multimerized epitope may be any polypeptide sequence that is specifically recognized by an affinity polypeptide of the present disclosure. Exemplary epitopes may include a c-Myc affinity tag, an HA affinity tag, a His affinity tag, an S affinity tag, a methionine-His affinity tag, an RGD-His affinity tag, a FLAG octapeptide, a strep tag or strep tag II, a V5 tag, a VSV-G epitope, and a GCN4 epitope.

[0135] Other exemplary amino acid sequences that may serve as epitopes and multimerized epitopes include, for example, phosphorylated tyrosines in specific sequence contexts recognized by SH2 domains, characteristic consensus sequences containing phosphoserines recognized by 14-3-3 proteins, proline rich peptide motifs recognized by SH3 domains, the PDZ protein interaction domain or the PDZ signal sequence, and the AGO hook motif from plants.

[0136] Epitopes described herein may also be multimerized. Multimerized epitopes may include at least 2, at least 3, at least 4, at least 5, at least 6, at least 7, at least 8, at least 9, at least 10, at least 11, at least 12, at least 13, at least 14, at least 15, at least 16, at least 17, at least 18, at least 19, at least 20, at least 21, at least 22, at least 23, or at least 24 or more copies of an epitope.

[0137] Multimerized epitopes may be present as tandem copies of an epitope, or each individual epitope may be separated from another epitope in the multimerized epitope by a linker or other amino acid sequence. Suitable linker regions are known in the art and are described herein. The linker may be configured to allow the binding of affinity polypeptides to adjacent epitopes without, or without substantial, steric hindrance. Linker sequences may also be configured to provide an unstructured or linear region of the polypeptide to which they are recombinantly fused. The linker sequence may comprise e.g. one or more glycines and/or serines. The linker sequences may be e.g. at least 2, at least 3, at least 4, at least 5, at least 6, at least 7, at least 8, at least 9, or at least 10 or more amino acids in length.

[0138] In some embodiments, the epitope is a GCN4 epitope (SEQ ID NO: 806). In some embodiments, the multimerized epitope contains at least 2, at least 3, at least 4, at least 5, at least 6, at least 7, at least 8, at least 9, at least 10, at least 11, at least 12, at least 13, at least 14, at least 15, at least 16, at least 17, at least 18, at least 19, at least 20, at least 21, at least 22, at least 23, or at least 24 copies of a GCN4 epitope. In some embodiments, the multimerized epitope contains 10 copies of a GCN4 epitope.

[0139] Additional epitopes and multimerized epitopes that may be used in the methods and compositions described herein will be readily apparent to those of skill in the art.

### Recombinant Proteins of the Present Disclosure

[0140] Certain methods of the present disclosure relate to reducing the expression of a target nucleic acid in a plant by recombinantly fusing an epigenetic regulator polypeptide to a heterologous DNA-binding domain, where the DNA-binding domain is able to bind a specific nucleic acid sequence and thus the epigenetic regulator is targeted to the specific nucleic acid sequence. Certain methods of the present disclosure relate to reducing the expression of a target nucleic acid in a plant by targeting an epigenetic regulator recombinantly fused to a CAS9 protein to the target nucleic acid. Certain methods of the present disclosure relate to reducing the expression of a target nucleic acid in a plant by targeting a recombinant epigenetic regulator to a target nucleic acid with the assistance of a CAS9 protein. As used herein, a “polypeptide” is an amino acid sequence including a plurality of consecutive polymerized amino acid residues (e.g., at least about 15 consecutive polymerized amino acid residues). “Polypeptide” refers to an amino acid sequence, oligopeptide, peptide, protein, or portions thereof, and the terms “polypeptide” and “protein” are used interchangeably.

[0141] Accordingly, provided herein are recombinant proteins for use in reducing the expression of a target nucleic acid in a plant. In some embodiments, a recombinant protein of the present disclosure interacts with an RNA polymerase. This interaction may be direct or it may be indirect. Whether the interaction of a recombinant protein of the present disclosure with an RNA polymerase is direct or indirect, and without wishing to be bound by theory, it is though that the interaction facilitates the recruitment of the RNA polymerase to a nucleic acid. In some embodiments, one or more additional proteins may be further involved in facilitating the interaction of a recombinant protein of the present disclosure with an RNA polymerase and recruitment of the RNA polymerase to a nucleic acid. In some embodiments, a recombinant protein of the present disclosure may interact, directly or indirectly, with RNA Pol IV and this interaction facilitates the recruitment of RNA Pol IV to a nucleic acid. In some embodiments, a recombinant protein of the present disclosure may interact, directly or indirectly, with RNA Pol V and this interaction facilitates the recruitment of RNA Pol V to a nucleic acid. In some embodiments, the recombinant proteins of the present disclosure facilitate RNA-directed DNA methylation of a nucleic acid.

[0142] In some embodiments, recombinant proteins of the present disclosure such as, for example, SHH1-like proteins, SHH2-like proteins, AGO4-like proteins, HDA6-like proteins, NRPD1-like proteins, JMJ14-like proteins, RDR2-like proteins, NRPE1-like proteins, NRPD2A/NRPE2-like proteins, NRPB3/NRPD3/NRPE3A-like proteins, NRPE3B-like proteins, NRPB11/NRPD1/NRPE11-like proteins, NRPB10/NRPD10/NRPE10-like proteins, NRPB12/NRPD12/NRPE12-like proteins, NRPB6A/NRPD6A/NRPE6A-like proteins, NRPB6B/NRPD6B/NRPE6B-like proteins, NRPB8A/NRPE8A-like proteins, NRPB8B/NRPD8B/NRPE8B-like proteins, NRPE5-like proteins, NRPD4/NRPE4-like proteins, NRPE7-like proteins, NRPD7-like proteins, NRPB5/NRPD5-like proteins, NRPB9A/NRPD9A/NRPE9A-like proteins, NRPB9B/NRPD9B/NRPE9B-like proteins, ATRX-like proteins, MOM1-like proteins, MORC1-like proteins, SssI-like proteins, DRM2-MTase-like proteins, DNMT3A-like proteins, DNMT3L-like proteins, MBD9-like proteins, SUVH2-like proteins, SUVH9-like proteins, DMS3-like proteins, MORC6-like proteins, SUVR2-like proteins, DRD1-like proteins, RDM1-like proteins, DRM3-like proteins, DRM2-like proteins, and/or FRG-like proteins are targeted to the same nucleic acid and cooperatively act to silence the expression of the target nucleic acid. Recombinant proteins of the present disclosure may be recombinantly expressed in a cell either alone or in combinations.

[0143] Polypeptides as described herein also include polypeptides having various amino acid additions, deletions, or substitutions relative to the native amino acid sequence of a polypeptide of the present disclosure. In some embodiments, polypeptides that are homologs of a polypeptide of the present disclosure contain non-conservative changes of certain amino acids relative to the native sequence of a polypeptide of the present disclosure. In some embodiments, polypeptides that are homologs of a polypeptide of the present disclosure contain conservative changes of certain amino acids relative to the native sequence of a polypeptide of the present disclosure, and thus may be referred to as conservatively modified variants. A conservatively modified variant may include individual substitutions, deletions or additions to a polypeptide sequence which result in the substitution of an amino acid with a chemically similar amino acid. Conservative substitution tables providing functionally similar amino acids are well-known in the art. Such conservatively modified variants are in addition to and do not exclude polymorphic variants, interspecies homologs, and alleles of the disclosure. The following eight groups contain amino acids that are conservative substitutions for one another: 1) Alanine (A), Glycine (G); 2) Aspartic acid (D), Glutamic acid (E); 3) Asparagine (N), Glutamine (Q); 4) Arginine (R), Lysine (K); 5) Isoleucine (I), Leucine (L), Methionine (M), Valine (V); 6) Phenylalanine (F), Tyrosine (Y), Tryptophan (W); 7) Serine (S), Threonine (T); and 8) Cysteine (C), Methionine (M) (see, e.g., Creighton, Proteins (1984)). A modification of an amino acid to produce a chemically similar amino acid may be referred to as an analogous amino acid.

[0144] Recombinant polypeptides of the present disclosure that are composed of individual polypeptide domains may be described based on the individual polypeptide domains of the overall recombinant polypeptide. A domain in such a recombinant polypeptide refers to the particular stretches of contiguous amino acid sequences with a particular function or activity. For example, in a recombinant polypeptide that is a fusion of an epigenetic regulator polypeptide and an affinity polypeptide, the contiguous amino acids that encode the epigenetic regulator polypeptide may be described as the epigenetic regulator domain in the overall recombinant polypeptide, and the contiguous amino acids that encode the affinity polypeptide may be described as the affinity domain in the overall recombinant polypeptide. Individual domains in an overall recombinant protein may also be referred to as units of the recombinant protein. Recombinant polypeptides that are composed of individual polypeptide domains may also be referred to as fusion polypeptides.

[0145] Fusion polypeptides of the present disclosure may contain an individual polypeptide domain that is in various N-terminal or C-terminal orientations relative to other individual polypeptide domains present in the fusion polypeptide. Fusion of individual polypeptide domains in fusion polypeptides may also be direct or indirect fusions. Direct fusions of individual polypeptide domains refer to direct fusion of the coding sequences of each respective individual polypeptide domain. In embodiments where the fusion is indirect, a linker domain or other contiguous amino acid sequence may separate the coding sequences of two individual polypeptide domains in a fusion polypeptide.

[0146] Nuclear Localization Signals (NLS)

[0147] Recombinant polypeptides of the present disclosure may contain one or more nuclear localization signals (NLS). Nuclear localization signals may also be referred to as nuclear localization sequences, domains, peptides, or other terms readily apparent to those of skill in the art. Nuclear localization signals are a translocation sequence that, when present in a polypeptide, direct that polypeptide to localize to the nucleus of a eukaryotic cell.

[0148] Various nuclear localization signals may be used in recombinant polypeptides of the present disclosure. For example, one or more SV40-type NLS or one or more REX NLS may be used in recombinant polypeptides. Recombinant polypeptides may also contain two or more tandem copies of a nuclear localization signal. For example, recombinant polypeptides may contain at least two, at least three, at least for, at least five, at least six, at least seven, at least eight, at least nine, or at least ten copies, either tandem or not, of a nuclear localization signal.

[0149] Recombinant polypeptides of the present disclosure may contain one or more nuclear localization signals that contain an amino acid sequence with at least about 20%, at least about 25%, at least about 30%, at least about 40%, at least about 50%, at least about 55%, at least about 60%, at least about 65%, at least about 70%, at least about 75%, at least about 80%, at least about 85%, at least about 90%, at least about 91%, at least about 92%, at least about 93%, at least about 94%, at least about 95%, at least about 96%, at least about 97%, at least about 98%, at least about 99%, or at least about 100% amino acid identity to the amino acid sequence of any one of SEQ ID NO: 779, SEQ ID NO: 797, and/or SEQ ID NO: 799.

[0150] SHH Proteins

[0151] Certain aspects of the present disclosure relate to SHH1-like proteins. In some embodiments, an SHH1-like protein refers to a recombinant SHH1 protein or fragment thereof that contains a heterologous DNA-binding domain. In some embodiments, an SHH1-like protein refers to a recombinant SHH1 protein or fragment thereof that is fused to a CAS9 protein or fragment thereof. In some embodiments, an SHH1-like protein refers to a recombinant SHH1 protein or fragment thereof that is fused to an MS2 coat protein or fragment thereof. In some embodiments, an SHH1-like protein refers to a recombinant SHH1 protein or fragment thereof that is fused to an scFV antibody or fragment thereof. SHH1-like proteins may be used in reducing the expression of one or more target nucleic acids, such as genes, in plants.

[0152] SHH1 proteins of the present disclosure are SAWADEE HOMEODOMAIN HOMOLOG 1 (SHH1) proteins. Full-length SHH1 proteins contain a homeodomain and a chromatin-binding SAWADEE domain. The SAWADEE chromatin-binding domain adopts a unique tandem Tudor-like fold and functions as a dual lysine reader, probing for both unmethylated K4 and methylated K9 modifications on the histone 3 (H3) tail.

[0153] It was previously demonstrated that SHH1 is a chromatin-binding protein that functions in RdDM to enable Pol-IV recruitment and/or stability at the most actively targeted genomic loci in order to promote siRNA biogenesis (See WO/2014/134567, which is incorporated herein by reference in its entirety). Without wishing to be bound by theory, it is believed that the finding that SHH1 binds to repressive histone modifications, together with the observation that SHH1 is required for Pol IV chromatin association at a similar set of loci as downstream RdDM mutants, could explain the previously observed self-reinforcing loop in which downstream RdDM mutants are required for the production of full levels of siRNAs from a subset of genomic loci (Zilberman et al., 2004; Xie et al., 2004; Li et al., 2006; Pontes et al., 2006) as it has been shown that downstream RdDM mutants can cause a reduction of both DNA methylation and H3K9 methylation at RdDM loci (Zilberman et al., 2003).

[0154] In some embodiments, SHH1-like proteins of the present disclosure are chromatin-binding proteins. In some embodiments, an SHH1-like protein of the present disclosure includes a functional fragment of a full-length SHH1 protein where the fragment maintains the ability to recruit RNA Pol IV to DNA. In some embodiments, an SHH1 protein fragment contains at least 20 consecutive amino acids, at least 30 consecutive amino acids, at least 40 consecutive amino acids, at least 50 consecutive amino acids, at least 60 consecutive amino acids, at least 70 consecutive amino acids, at least 80 consecutive amino acids, at least 90 consecutive amino acids, at least 100 consecutive amino acids, at least 120 consecutive amino acids, at least 140 consecutive amino acids, at least 160 consecutive amino acids, at least 180 consecutive amino acids, at least 200 consecutive amino acids, at least 220 consecutive amino acids, at least 240 consecutive amino acids, or 241 or more consecutive amino acids of a full-length SHH1 protein. In some embodiments, SHH1 protein fragments may include sequences with one or more amino acids removed from the consecutive amino acid sequence of a full-length SHH1 protein. In some embodiments, SHH1 protein fragments may include sequences with one or more amino acids replaced/substituted with an amino acid different from the endogenous amino acid present at a given amino acid position in a consecutive amino acid sequence of a full-length SHH1 protein. In some embodiments, SHH1 protein fragments may include sequences with one or more amino acids added to an otherwise consecutive amino acid sequence of a full-length SHH1 protein.

[0155] Suitable SHH1 proteins may be identified and isolated from monocot and dicot plants. Examples of such plants may include, for example, Arabidopsis spp., Ricinus communis, Glycine max, Zea Mays, Medicago truncatula, Physcomitrella patens, Sorghum bicolor, and Oryza sativa. Examples of suitable SHH1 proteins may include, for example, those listed in Table 1, homologs thereof, and orthologs thereof.

TABLE 1
SHH1 Proteins

| | | SED ID |
|---|---|---|
| Organism | Gene Name | NO. |
| Arabidopsis thaliana | NP_849666.2 | 1 |
| Ricinus communis | XP_002515974.1 | 2 |
| Glycine max | XP_003531650.1 | 3 |
| Zea mays | NP_001141052.1 | 4 |
| Medicago truncatula | AFK39040.1 | 5 |
| Physcomitrella patens | XP_001760710.1 | 6 |
| Sorghum bicolor | XP_002462170.1 | 7 |
| Oryza sativa | NP_001062942.1 | 8 |
| Brachypodium distachyon | XP_003563870.1 | 9 |
| Populus trichocarpa | XP_002299736.1 | 10 |
| Vitis vinifera | XP_002283948.1 | 11 |
| Cucumis sativus | XP_004155951.1 | 12 |
| Arabidopsis lyrata | XP_002890094.1 | 13 |

[0156] In some embodiments, an SHH1 protein or fragment thereof of the present disclosure has an amino acid sequence with at least about 20%, at least about 25%, at least about 30%, at least about 40%, at least about 50%, at least about 55%, at least about 60%, at least about 65%, at least about 70%, at least about 75%, at least about 80%, at least about 85%, at least about 90%, at least about 91%, at least about 92%, at least about 93%, at least about 94%, at least about 95%, at least about 96%, at least about 97%, at least about 98%, at least about 99%, or at least about 100% amino acid identity to the amino acid sequence of the A. thaliana SHH1 protein (SEQ ID NO: 1).

[0157] An SHH1-like protein may include the amino acid sequence or a fragment thereof of any SHH1 homolog or ortholog, such as any one of those listed in Table 1. One of skill would readily recognize that additional SHH1 homologs and/or orthologs may exist and may be used herein.

[0158] SHH2 Proteins

[0159] Certain aspects of the present disclosure relate to SHH2-like proteins. In some embodiments, an SHH2-like protein refers to a recombinant SHH2 protein or fragment thereof that contains a heterologous DNA-binding domain. In some embodiments, an SHH2-like protein refers to a recombinant SHH2 protein or fragment thereof that is fused to a CAS9 protein or fragment thereof. In some embodiments, an SHH2-like protein refers to a recombinant SHH2 protein or fragment thereof that is fused to an MS2 coat protein or fragment thereof. In some embodiments, an SHH2-like protein refers to a recombinant SHH2 protein or fragment thereof that is fused to an scFV antibody or fragment thereof. SHH2-like proteins may be used in reducing the expression of one or more target nucleic acids, such as genes, in plants.

[0160] SHH2 is a homolog of SHH1 as described above. In some embodiments, SHH2-like proteins of the present disclosure are chromatin-binding proteins. In some embodiments, an SHH2-like protein of the present disclosure includes a functional fragment of a full-length SHH2 protein where the fragment maintains the ability to recruit RNA Pol IV to DNA. In some embodiments, an SHH2 protein fragment contains at least 20 consecutive amino acids, at least 30 consecutive amino acids, at least 40 consecutive amino acids, at least 50 consecutive amino acids, at least 60 consecutive amino acids, at least 70 consecutive amino acids, at least 80 consecutive amino acids, at least 90 consecutive amino acids, at least 100 consecutive amino acids, at least 120 consecutive amino acids, at least 140 consecutive amino acids, at least 160 consecutive amino acids, at least 180 consecutive amino acids, at least 200 consecutive amino acids, at least 220 consecutive amino acids, at least 240 consecutive amino acids, or 241 or more consecutive amino acids of a full-length SHH2 protein. In some embodiments, SHH2 protein fragments may include sequences with one or more amino acids removed from the consecutive amino acid sequence of a full-length SHH2 protein. In some embodiments, SHH2 protein fragments may include sequences with one or more amino acids replaced/substituted with an amino acid different from the endogenous amino acid present at a given amino acid position in a consecutive amino acid sequence of a full-length SHH2 protein. In some embodiments, SHH2 protein fragments may include sequences with one or more amino acids added to an otherwise consecutive amino acid sequence of a full-length SHH2 protein.

[0161] Suitable SHH2 proteins may be identified and isolated from monocot and dicot plants. Examples of such plants may include, for example, Arabidopsis spp., Ricinus communis, Glycine max, Zea Mays, Medicago truncatula, Physcomitrella patens, Sorghum bicolor, and Oryza sativa. Examples of suitable SHH2 proteins may include, for example, those listed in Table 2, homologs thereof, and orthologs thereof.

TABLE 2
SHH2 Proteins

| | | SED ID |
|---|---|---|
| Organism | Gene Name | NO. |
| Arabidopsis thaliana | AEE76089 | 14 |

[0162] In some embodiments, an SHH2 protein or fragment thereof of the present disclosure has an amino acid sequence with at least about 20%, at least about 25%, at least about 30%, at least about 40%, at least about 50%, at least about 55%, at least about 60%, at least about 65%, at least about 70%, at least about 75%, at least about 80%, at least about 85%, at least about 90%, at least about 91%, at least about 92%, at least about 93%, at least about 94%, at least about 95%, at least about 96%, at least about 97%, at least about 98%, at least about 99%, or at least about 100% amino acid identity to the amino acid sequence of the A. thaliana SHH2 protein (SEQ ID NO: 14). Suitable SHH2 proteins may also include homologous SHH1 proteins, such as those described in Table 1.

[0163] An SHH2-like protein may include the amino acid sequence or a fragment thereof of any SHH2 homolog or ortholog, such as any one of those listed in Table 2. One of skill would readily recognize that additional SHH2 homologs and/or orthologs may exist and may be used herein.

[0164] AGO4 Proteins

[0165] Certain aspects of the present disclosure relate to AGO4-like proteins. In some embodiments, an AGO4-like protein refers to a recombinant AGO4 protein or fragment thereof and that contains a heterologous DNA-binding domain. In some embodiments, an AGO4-like protein refers to a recombinant AGO4 protein or fragment thereof that is fused to a CAS9 protein or fragment thereof. In some embodiments, an AGO4-like protein refers to a recombinant AGO4 protein or fragment thereof that is fused to an MS2 coat protein or fragment thereof. In some embodiments, an AGO4-like protein refers to a recombinant AGO4 protein or fragment thereof that is fused to an scFV antibody or fragment thereof. AGO4-like proteins may be used in reducing the expression of one or more target nucleic acids, such as genes, in plants.

[0166] AGO4 proteins are known in the art and are described herein. In some embodiments, an AGO4 protein fragment contains at least 20 consecutive amino acids, at least 30 consecutive amino acids, at least 40 consecutive amino acids, at least 50 consecutive amino acids, at least 60 consecutive amino acids, at least 70 consecutive amino acids, at least 80 consecutive amino acids, at least 90 consecutive amino acids, at least 100 consecutive amino acids, at least 120 consecutive amino acids, at least 140 consecutive amino acids, at least 160 consecutive amino acids, at least 180 consecutive amino acids, at least 200 consecutive amino acids, at least 220 consecutive amino acids, at least 240 consecutive amino acids, or 241 or more consecutive amino acids of a full-length AGO4 protein. In some embodiments, AGO4 protein fragments may include sequences with one or more amino acids removed from the consecutive amino acid sequence of a full-length AGO4 protein. In some embodiments, AGO4 protein fragments may include sequences with one or more amino acids replaced/substituted with an amino acid different from the endogenous amino acid present at a given amino acid position in a consecutive amino acid sequence of a full-length AGO4 protein. In some embodiments, AGO4 protein fragments may include sequences with one or more amino acids added to an otherwise consecutive amino acid sequence of a full-length AGO4 protein.

[0167] Suitable AGO4 proteins may be identified and isolated from monocot and dicot plants. Examples of such plants may include, for example, Arabidopsis spp., Ricinus communis, Glycine max, Zea Mays, Medicago truncatula, Physcomitrella patens, Sorghum bicolor, and Oryza sativa. Examples of suitable AGO4 proteins may include, for example, those listed in Table 3, homologs thereof, and orthologs thereof.

TABLE 3
AGO4 Proteins

| | | SED ID |
|---|---|---|
| Organism | Gene Name | NO. |
| Arabidopsis thaliana | Q9ZVD5 | 15 |
| Arabidopsis lyrata | XP_002880875 | 16 |
| Cucumis sativus | XP_011653531 | 17 |
| Vitis vinifera | XP_002275928 | 18 |
| Medicago truncatula | XP_003617095 | 19 |
| Ricinus communis | XP_002527764 | 20 |
| Glycine max | XP_003545462 | 21 |
| Zea mays | NP_001167850 | 22 |
| Sorghum bicolor | XP_002440386 | 23 |
| Oryza sativa | NP_001052115 | 24 |
| Brachypodium distachyon | XP_010230772 | 25 |
| Populus trichocarpa | XP_006369390 | 26 |
| Brassica napus | CDX77061 | 27 |

[0168] In some embodiments, an AGO4 protein or fragment thereof of the present disclosure has an amino acid sequence with at least about 20%, at least about 25%, at least about 30%, at least about 40%, at least about 50%, at least about 55%, at least about 60%, at least about 65%, at least about 70%, at least about 75%, at least about 80%, at least about 85%, at least about 90%, at least about 91%, at least about 92%, at least about 93%, at least about 94%, at least about 95%, at least about 96%, at least about 97%, at least about 98%, at least about 99%, or at least about 100% amino acid identity to the amino acid sequence of the A. thaliana AGO4 protein (SEQ ID NO: 15).

[0169] An AGO4-like protein may include the amino acid sequence or a fragment thereof of any AGO4 homolog or ortholog, such as any one of those listed in Table 3. One of skill would readily recognize that additional AGO4 homologs and/or orthologs may exist and may be used herein.

[0170] AGO4 is a PAZ/PIWI domain-containing protein that belongs to a clade of proteins that includes e.g. AGO6 and AGO9. Exemplary proteins in this clade, using A. thaliana as an exemplary host plant, include, for example, AGO6 (SEQ ID NO: 363) and AGO9 (SEQ ID NO: 364). An alignment of various proteins in this clade from A. thaliana is provided in FIG. 1. The proteins in this clade, as well as homologs and orthologs thereof, may also be used in the methods and compositions of the present disclosure to target and silence a specific nucleic acid as described herein for AGO4-like proteins. AGO3 (SEQ ID NO: 503), as well as homologs and orthologs thereof, may also be used in the methods and compositions of the present disclosure to target and silence a specific nucleic acid as described herein for AGO4-like proteins.

[0171] HDA6 Proteins

[0172] Certain aspects of the present disclosure relate to HDA6-like proteins. In some embodiments, an HDA6-like protein refers to a recombinant HDA6 protein or fragment thereof and that contains a heterologous DNA-binding domain. In some embodiments, an HDA6-like protein refers to a recombinant HDA6 protein or fragment thereof that is fused to a CAS9 protein or fragment thereof. In some embodiments, an HDA6-like protein refers to a recombinant HDA6 protein or fragment thereof that is fused to an MS2 coat protein or fragment thereof. In some embodiments, an HDA6-like protein refers to a recombinant HDA6 protein or fragment thereof that is fused to an scFV antibody or fragment thereof. HDA6-like proteins may be used in reducing the expression of one or more target nucleic acids, such as genes, in plants.

[0173] HDA6 proteins are known in the art and are described herein. In some embodiments, an HDA6 protein fragment contains at least 20 consecutive amino acids, at least 30 consecutive amino acids, at least 40 consecutive amino acids, at least 50 consecutive amino acids, at least 60 consecutive amino acids, at least 70 consecutive amino acids, at least 80 consecutive amino acids, at least 90 consecutive amino acids, at least 100 consecutive amino acids, at least 120 consecutive amino acids, at least 140 consecutive amino acids, at least 160 consecutive amino acids, at least 180 consecutive amino acids, at least 200 consecutive amino acids, at least 220 consecutive amino acids, at least 240 consecutive amino acids, or 241 or more consecutive amino acids of a full-length HDA6 protein. In some embodiments, HDA6 protein fragments may include sequences with one or more amino acids removed from the consecutive amino acid sequence of a full-length HDA6 protein. In some embodiments, HDA6 protein fragments may include sequences with one or more amino acids replaced/substituted with an amino acid different from the endogenous amino acid present at a given amino acid position in a consecutive amino acid sequence of a full-length HDA6 protein. In some embodiments, HDA6 protein fragments may include sequences with one or more amino acids added to an otherwise consecutive amino acid sequence of a full-length HDA6 protein.

[0174] Suitable HDA6 proteins may be identified and isolated from monocot and dicot plants. Examples of such plants may include, for example, Arabidopsis spp., Ricinus communis, Glycine max, Zea Mays, Medicago truncatula, Physcomitrella patens, Sorghum bicolor, and Oryza sativa. Examples of suitable HDA6 proteins may include, for example, those listed in Table 4, homologs thereof, and orthologs thereof.

TABLE 4
HDA6 Proteins

| | | SED ID |
|---|---|---|
| Organism | Gene Name | NO. |
| Arabidopsis thaliana | Q9FML2 | 28 |
| Arabidopsis lyrata | XP_002866535 | 29 |
| Cucumis sativus | XP_004138094 | 30 |
| Vitis vinifera | XP_010663108 | 31 |
| Medicago truncatula | XP_003601202 | 32 |
| Ricinus communis | XP_002511337 | 33 |
| Glycine max | XP_003525556 | 34 |
| Zea mays | NP_001104901 | 35 |
| Sorghum bicolor | XP_002444249 | 36 |
| Oryza sativa | NP_001061596 | 37 |
| Brachypodium distachyon | XP_003573796 | 38 |
| Populus trichocarpa | XP_002322192 | 39 |
| Brassica napus | CDX84385 | 40 |

[0175] In some embodiments, an HDA6 protein or fragment thereof of the present disclosure has an amino acid sequence with at least about 20%, at least about 25%, at least about 30%, at least about 40%, at least about 50%, at least about 55%, at least about 60%, at least about 65%, at least about 70%, at least about 75%, at least about 80%, at least about 85%, at least about 90%, at least about 91%, at least about 92%, at least about 93%, at least about 94%, at least about 95%, at least about 96%, at least about 97%, at least about 98%, at least about 99%, or at least about 100% amino acid identity to the amino acid sequence of the A. thaliana HDA6 protein (SEQ ID NO: 28).

[0176] An HDA6-like protein may include the amino acid sequence or a fragment thereof of any HDA6 homolog or ortholog, such as any one of those listed in Table 4. One of skill would readily recognize that additional HDA6 homologs and/or orthologs may exist and may be used herein.

[0177] HDA6 is a histone deacetylase that belongs to a clade of proteins that includes e.g. HDA1, HDA7, and HDA9. Exemplary proteins in this clade, using A. thaliana as an exemplary host plant, include, for example, HDA1 (SEQ ID NO: 365), HDA7 (SEQ ID NO: 366), HDA9 (SEQ ID NO: 367), HDA15 (SEQ ID NO: 369), and HDA14 (SEQ ID NO: 370). An alignment of various proteins in this clade from A. thaliana is provided in FIG. 2. The proteins in this clade, as well as homologs and orthologs thereof, may also be used in the methods and compositions of the present disclosure to target and silence a specific nucleic acid as described herein for HDA6-like proteins.

[0178] NRPD1 Proteins

[0179] Certain aspects of the present disclosure relate to NRPD1-like proteins. In some embodiments, an NRPD1-like protein refers to a recombinant NRPD1 protein or fragment thereof and that contains a heterologous DNA-binding domain. In some embodiments, an NRPD1-like protein refers to a recombinant NRPD1 protein or fragment thereof that is fused to a CAS9 protein or fragment thereof. In some embodiments, an NRPD1-like protein refers to a recombinant NRPD1 protein or fragment thereof that is fused to an MS2 coat protein or fragment thereof. In some embodiments, an NRPD1-like protein refers to a recombinant NRPD1 protein or fragment thereof that is fused to an scFV antibody or fragment thereof. NRPD1-like proteins may be used in reducing the expression of one or more target nucleic acids, such as genes, in plants.

[0180] NRPD1 proteins are known in the art and are described herein. NRPD1 proteins encode a large subunit of RNA Pol IV. In some embodiments, an NRPD1 protein fragment contains at least 20 consecutive amino acids, at least 30 consecutive amino acids, at least 40 consecutive amino acids, at least 50 consecutive amino acids, at least 60 consecutive amino acids, at least 70 consecutive amino acids, at least 80 consecutive amino acids, at least 90 consecutive amino acids, at least 100 consecutive amino acids, at least 120 consecutive amino acids, at least 140 consecutive amino acids, at least 160 consecutive amino acids, at least 180 consecutive amino acids, at least 200 consecutive amino acids, at least 220 consecutive amino acids, at least 240 consecutive amino acids, or 241 or more consecutive amino acids of a full-length NRPD1 protein. In some embodiments, NRPD1 protein fragments may include sequences with one or more amino acids removed from the consecutive amino acid sequence of a full-length NRPD1 protein. In some embodiments, NRPD1 protein fragments may include sequences with one or more amino acids replaced/substituted with an amino acid different from the endogenous amino acid present at a given amino acid position in a consecutive amino acid sequence of a full-length NRPD1 protein. In some embodiments, NRPD1 protein fragments may include sequences with one or more amino acids added to an otherwise consecutive amino acid sequence of a full-length NRPD1 protein.

[0181] Suitable NRPD1 proteins may be identified and isolated from monocot and dicot plants. Examples of such plants may include, for example, Arabidopsis spp., Ricinus communis, Glycine max, Zea Mays, Medicago truncatula, Physcomitrella patens, Sorghum bicolor, and Oryza sativa. Examples of suitable NRPD1 proteins may include, for example, those listed in Table 5, homologs thereof, and orthologs thereof.

TABLE 5
NRPD1 Proteins

| | | SED ID |
|---|---|---|
| Organism | Gene Name | NO. |
| Arabidopsis thaliana | Q9LQ02 | 41 |
| Arabidopsis lyrata | XP_002886441.1 | 42 |
| Cucumis sativus | XP_004147993 | 43 |
| Vitis vinifera | XP_010661369.1 | 44 |
| Medicago truncatula | AES94122.2 | 45 |
| Ricinus communis | XP_002509696.1 | 46 |
| Glycine max | XP_006573754.1 | 47 |
| Zea mays | NP_001182824.1 | 48 |
| Sorghum bicolor | XP_002446962 | 49 |
| Oryza sativa | EEE61535 | 50 |
| Brachypodium distachyon | XP_003566523.1 | 51 |
| Populus trichocarpa | XP_002298071.2 | 52 |
| Brassica napus | CDY32191 | 53 |

[0182] In some embodiments, an NRPD1 protein or fragment thereof of the present disclosure has an amino acid sequence with at least about 20%, at least about 25%, at least about 30%, at least about 40%, at least about 50%, at least about 55%, at least about 60%, at least about 65%, at least about 70%, at least about 75%, at least about 80%, at least about 85%, at least about 90%, at least about 91%, at least about 92%, at least about 93%, at least about 94%, at least about 95%, at least about 96%, at least about 97%, at least about 98%, at least about 99%, or at least about 100% amino acid identity to the amino acid sequence of the A. thaliana NRPD1 protein (SEQ ID NO: 41).

[0183] An NRPD1-like protein may include the amino acid sequence or a fragment thereof of any NRPD1 homolog or ortholog, such as any one of those listed in Table 5. One of skill would readily recognize that additional NRPD1 homologs and/or orthologs may exist and may be used herein.

[0184] NRPE1 Proteins

[0185] Certain aspects of the present disclosure relate to NRPE1-like proteins. In some embodiments, an NRPE1-like protein refers to a recombinant NRPE1 protein or fragment thereof and that contains a heterologous DNA-binding domain. In some embodiments, an NRPE1-like protein refers to a recombinant NRPE1 protein or fragment thereof that is fused to a CAS9 protein or fragment thereof. In some embodiments, an NRPE1-like protein refers to a recombinant NRPE1 protein or fragment thereof that is fused to an MS2 coat protein or fragment thereof. In some embodiments, an NRPE1-like protein refers to a recombinant NRPE1 protein or fragment thereof that is fused to an scFV antibody or fragment thereof. NRPE1-like proteins may be used in reducing the expression of one or more target nucleic acids, such as genes, in plants.

[0186] NRPE1 proteins are known in the art and are described herein. NRPE1 proteins encode a large subunit of RNA Pol V. In some embodiments, an NRPE1 protein fragment contains at least 20 consecutive amino acids, at least 30 consecutive amino acids, at least 40 consecutive amino acids, at least 50 consecutive amino acids, at least 60 consecutive amino acids, at least 70 consecutive amino acids, at least 80 consecutive amino acids, at least 90 consecutive amino acids, at least 100 consecutive amino acids, at least 120 consecutive amino acids, at least 140 consecutive amino acids, at least 160 consecutive amino acids, at least 180 consecutive amino acids, at least 200 consecutive amino acids, at least 220 consecutive amino acids, at least 240 consecutive amino acids, or 241 or more consecutive amino acids of a full-length NRPE1 protein. In some embodiments, NRPE1 protein fragments may include sequences with one or more amino acids removed from the consecutive amino acid sequence of a full-length NRPE1 protein. In some embodiments, NRPE1 protein fragments may include sequences with one or more amino acids replaced/substituted with an amino acid different from the endogenous amino acid present at a given amino acid position in a consecutive amino acid sequence of a full-length NRPE1 protein. In some embodiments, NRPE1 protein fragments may include sequences with one or more amino acids added to an otherwise consecutive amino acid sequence of a full-length NRPE1 protein.

[0187] Suitable NRPE1 proteins may be identified and isolated from monocot and dicot plants. Examples of such plants may include, for example, Arabidopsis spp., Ricinus communis, Glycine max, Zea Mays, Medicago truncatula, Physcomitrella patens, Sorghum bicolor, and Oryza sativa. Examples of suitable NRPE1 proteins may include, for example, those listed in Table 6, homologs thereof, and orthologs thereof.

TABLE 6
NRPE1 Proteins

| | | SED ID |
|---|---|---|
| Organism | Gene Name | NO. |
| Arabidopsis thaliana | Q5D869 | 54 |
| Arabidopsis lyrata | XP_002879839.1 | 55 |
| Cucumis sativus | XP_004155767.1 | 56 |
| Vitis vinifera | CBI40152.3 | 57 |
| Medicago truncatula | AET02314.2 | 58 |
| Ricinus communis | XP_002513060 | 59 |
| Glycine max | XP_006598109.1 | 60 |
| Zea mays | XP_008679943 | 61 |
| Sorghum bicolor | XP_002459158.1 | 62 |
| Oryza sativa | EEE56320 | 63 |
| Brachypodium distachyon | XP_010238829 | 64 |
| Populus trichocarpa | XP_002303926 | 65 |
| Brassica napus | CDY60335 | 66 |

[0188] In some embodiments, an NRPE1 protein or fragment thereof of the present disclosure has an amino acid sequence with at least about 20%, at least about 25%, at least about 30%, at least about 40%, at least about 50%, at least about 55%, at least about 60%, at least about 65%, at least about 70%, at least about 75%, at least about 80%, at least about 85%, at least about 90%, at least about 91%, at least about 92%, at least about 93%, at least about 94%, at least about 95%, at least about 96%, at least about 97%, at least about 98%, at least about 99%, or at least about 100% amino acid identity to the amino acid sequence of the A. thaliana NRPE1 protein (SEQ ID NO: 54).

[0189] An NRPE1-like protein may include the amino acid sequence or a fragment thereof of any NRPE1 homolog or ortholog, such as any one of those listed in Table 6. One of skill would readily recognize that additional NRPE1 homologs and/or orthologs may exist and may be used herein.

[0190] In addition to the NRPE1 proteins, orthologs, and homologs described herein, NRPE1 proteins contain a domain known as the AGO hook, which is involved with binding AGO4 proteins. Exemplary sequences of the AGO hook, using A. thaliana as an exemplary host plant, include, for example, SEQ ID NO: 371. An exemplary polypeptide containing a 5× multimerized AGO-hook is presented in SEQ ID NO: 372. Proteins and protein fragments containing an AGO-hook sequence may also be used in the methods and compositions of the present disclosure to target and silence a specific nucleic acid as described herein for NRPE1-like proteins.

[0191] JMJ14 Proteins

[0192] Certain aspects of the present disclosure relate to JMJ14-like proteins. In some embodiments, a JMJ14-like protein refers to a recombinant JMJ14 protein or fragment thereof and that contains a heterologous DNA-binding domain. In some embodiments, a JMJ14-like protein refers to a recombinant JMJ14 protein or fragment thereof that is fused to a CAS9 protein or fragment thereof. In some embodiments, a JMJ14-like protein refers to a recombinant JMJ14 protein or fragment thereof that is fused to an MS2 coat protein or fragment thereof. In some embodiments, a JMJ14-like protein refers to a recombinant JMJ14 protein or fragment thereof that is fused to an scFV antibody or fragment thereof. JMJ14-like proteins may be used in reducing the expression of one or more target nucleic acids, such as genes, in plants.

[0193] JMJ14 proteins are known in the art and are described herein. In some embodiments, a JMJ14 protein fragment contains at least 20 consecutive amino acids, at least 30 consecutive amino acids, at least 40 consecutive amino acids, at least 50 consecutive amino acids, at least 60 consecutive amino acids, at least 70 consecutive amino acids, at least 80 consecutive amino acids, at least 90 consecutive amino acids, at least 100 consecutive amino acids, at least 120 consecutive amino acids, at least 140 consecutive amino acids, at least 160 consecutive amino acids, at least 180 consecutive amino acids, at least 200 consecutive amino acids, at least 220 consecutive amino acids, at least 240 consecutive amino acids, or 241 or more consecutive amino acids of a full-length JMJ14 protein. In some embodiments, JMJ14 protein fragments may include sequences with one or more amino acids removed from the consecutive amino acid sequence of a full-length JMJ14 protein. In some embodiments, JMJ14 protein fragments may include sequences with one or more amino acids replaced/substituted with an amino acid different from the endogenous amino acid present at a given amino acid position in a consecutive amino acid sequence of a full-length JMJ14 protein. In some embodiments, JMJ14 protein fragments may include sequences with one or more amino acids added to an otherwise consecutive amino acid sequence of a full-length JMJ14 protein.

[0194] Suitable JMJ14 proteins may be identified and isolated from monocot and dicot plants. Examples of such plants may include, for example, Arabidopsis spp., Ricinus communis, Glycine max, Zea Mays, Medicago truncatula, Physcomitrella patens, Sorghum bicolor, and Oryza sativa. Examples of suitable JMJ14 proteins may include, for example, those listed in Table 7, homologs thereof, and orthologs thereof.

TABLE 7
JMJ14 Proteins

| | | SED ID |
|---|---|---|
| Organism | Gene Name | NO. |
| Arabidopsis thaliana | Q8GUI6 | 80 |
| Arabidopsis lyrata | XP_002869932 | 81 |
| Cucumis sativus | XP_004135564 | 82 |
| Vitis vinifera | CBI39010 | 83 |
| Medicago truncatula | KEH37778 | 84 |
| Ricinus communis | XP_002529883 | 85 |
| Glycine max | XP_003535005 | 86 |
| Zea mays | XP_008648146 | 87 |
| Sorghum bicolor | XP_002454748 | 88 |
| Oryza sativa | EEE63155 | 89 |
| Brachypodium distachyon | XP_010235272 | 90 |
| Populus trichocarpa | XP_006370484 | 91 |
| Brassica napus | CDX82762 | 92 |

[0195] In some embodiments, a JMJ14 protein or fragment thereof of the present disclosure has an amino acid sequence with at least about 20%, at least about 25%, at least about 30%, at least about 40%, at least about 50%, at least about 55%, at least about 60%, at least about 65%, at least about 70%, at least about 75%, at least about 80%, at least about 85%, at least about 90%, at least about 91%, at least about 92%, at least about 93%, at least about 94%, at least about 95%, at least about 96%, at least about 97%, at least about 98%, at least about 99%, or at least about 100% amino acid identity to the amino acid sequence of the A. thaliana JMJ14 protein (SEQ ID NO: 80).

[0196] A JMJ14-like protein may include the amino acid sequence or a fragment thereof of any JMJ14 homolog or ortholog, such as any one of those listed in Table 7. One of skill would readily recognize that additional JMJ14 homologs and/or orthologs may exist and may be used herein.

[0197] JMJ14 is an H3K4 demethylase that belongs to a clade of proteins that includes e.g. JMJ18, JMJ15, and PKDM7D. Exemplary proteins in this clade, using A. thaliana as an exemplary host plant, include, for example, JMJ18 (SEQ ID NO: 376), JMJ15 (SEQ ID NO: 377), and PKDM7D (SEQ ID NO: 378). An alignment of various proteins in this clade from A. thaliana is provided in FIG. 3A-3B. The proteins in this clade, as well as homologs and orthologs thereof, may also be used in the methods and compositions of the present disclosure to target and silence a specific nucleic acid as described herein for JMJ14-like proteins.

[0198] RDR2 Proteins

[0199] Certain aspects of the present disclosure relate to RDR2-like proteins. In some embodiments, an RDR2-like protein refers to a recombinant RDR2 protein or fragment thereof and that contains a heterologous DNA-binding domain. In some embodiments, an RDR2-like protein refers to a recombinant RDR2 protein or fragment thereof that is fused to a CAS9 protein or fragment thereof. In some embodiments, an RDR2-like protein refers to a recombinant RDR2 protein or fragment thereof that is fused to an MS2 coat protein or fragment thereof. In some embodiments, an RDR2-like protein refers to a recombinant RDR2 protein or fragment thereof that is fused to an scFV antibody or fragment thereof. RDR2-like proteins may be used in reducing the expression of one or more target nucleic acids, such as genes, in plants.

[0200] RDR2 proteins are known in the art and are described herein. In some embodiments, a RDR2 protein fragment contains at least 20 consecutive amino acids, at least 30 consecutive amino acids, at least 40 consecutive amino acids, at least 50 consecutive amino acids, at least 60 consecutive amino acids, at least 70 consecutive amino acids, at least 80 consecutive amino acids, at least 90 consecutive amino acids, at least 100 consecutive amino acids, at least 120 consecutive amino acids, at least 140 consecutive amino acids, at least 160 consecutive amino acids, at least 180 consecutive amino acids, at least 200 consecutive amino acids, at least 220 consecutive amino acids, at least 240 consecutive amino acids, or 241 or more consecutive amino acids of a full-length RDR2 protein. In some embodiments, RDR2 protein fragments may include sequences with one or more amino acids removed from the consecutive amino acid sequence of a full-length RDR2 protein. In some embodiments, RDR2 protein fragments may include sequences with one or more amino acids replaced/substituted with an amino acid different from the endogenous amino acid present at a given amino acid position in a consecutive amino acid sequence of a full-length RDR2 protein. In some embodiments, RDR2 protein fragments may include sequences with one or more amino acids added to an otherwise consecutive amino acid sequence of a full-length RDR2 protein.

[0201] Suitable RDR2 proteins may be identified and isolated from monocot and dicot plants. Examples of such plants may include, for example, Arabidopsis spp., Ricinus communis, Glycine max, Zea Mays, Medicago truncatula, Physcomitrella patens, Sorghum bicolor, and Oryza sativa. Examples of suitable RDR2 proteins may include, for example, those listed in Table 8, homologs thereof, and orthologs thereof.

TABLE 8
RDR2 Proteins

| | | SED ID |
|---|---|---|
| Organism | Gene Name | NO. |
| Arabidopsis thaliana | O82504 | 132 |
| Arabidopsis lyrata | XP_002872551 | 133 |
| Cucumis sativus | NP_001267608 | 134 |
| Vitis vinifera | XP_002280099 | 135 |
| Medicago truncatula | KEH31853 | 136 |
| Ricinus communis | XP_002511431 | 137 |
| Glycine max | XP_006579560 | 138 |
| Zea mays | NP_001183867 | 139 |
| Sorghum bicolor | XP_002446635 | 140 |
| Oryza sativa | EEE57765 | 141 |
| Brachypodium disiachyon | XP_003579930 | 142 |
| Populus trichocarpa | XP_002321582 | 143 |
| Brassica napus | CDX86814 | 144 |

[0202] In some embodiments, an RDR2 protein or fragment thereof of the present disclosure has an amino acid sequence with at least about 20%, at least about 25%, at least about 30%, at least about 40%, at least about 50%, at least about 55%, at least about 60%, at least about 65%, at least about 70%, at least about 75%, at least about 80%, at least about 85%, at least about 90%, at least about 91%, at least about 92%, at least about 93%, at least about 94%, at least about 95%, at least about 96%, at least about 97%, at least about 98%, at least about 99%, or at least about 100% amino acid identity to the amino acid sequence of the A. thaliana RDR2 protein (SEQ ID NO: 132).

[0203] An RDR2-like protein may include the amino acid sequence or a fragment thereof of any RDR2 homolog or ortholog, such as any one of those listed in Table 8. One of skill would readily recognize that additional RDR2 homologs and/or orthologs may exist and may be used herein.

[0204] RDR2 is an RNA-dependent RNA polymerase and forms a complex with RNA Pol IV. RDR2 belongs to a clade of proteins that includes e.g. RDR1. Exemplary proteins in this clade, using A. thaliana as an exemplary host plant, include, for example, RDR1 (SEQ ID NO: 389). An alignment of various proteins in this clade from A. thaliana is provided in FIG. 4A-4B. The proteins in this clade, as well as homologs and orthologs thereof, may also be used in the methods and compositions of the present disclosure to target and silence a specific nucleic acid as described herein for RDR2-like proteins.

[0205] NRPD2A/NRPE2 Proteins

[0206] Certain aspects of the present disclosure relate to NRPD2A/NRPE2-like proteins. In some embodiments, an NRPD2A/NRPE2-like protein refers to a recombinant NRPD2A/NRPE2 protein or fragment thereof and that contains a heterologous DNA-binding domain. In some embodiments, an NRPD2A/NRPE2-like protein refers to a recombinant NRPD2A/NRPE2 protein or fragment thereof that is fused to a CAS9 protein or fragment thereof. In some embodiments, an NRPD2A/NRPE2-like protein refers to a recombinant NRPD2A/NRPE2 protein or fragment thereof that is fused to an MS2 coat protein or fragment thereof. In some embodiments, an NRPD2A/NRPE2-like protein refers to a recombinant NRPD2A/NRPE2 protein or fragment thereof that is fused to an scFV antibody or fragment thereof. NRPD2A/NRPE2-like proteins may be used in reducing the expression of one or more target nucleic acids, such as genes, in plants.

[0207] NRPD2A/NRPE2 proteins are known in the art and are described herein. NRPD2A and NRPE2 are alternative names for the same protein, as is readily understood in the art. NRPD2A/NRPE2 proteins encode a subunit of RNA Pol IV. In some embodiments, an NRPD2A/NRPE2 protein fragment contains at least 20 consecutive amino acids, at least 30 consecutive amino acids, at least 40 consecutive amino acids, at least 50 consecutive amino acids, at least 60 consecutive amino acids, at least 70 consecutive amino acids, at least 80 consecutive amino acids, at least 90 consecutive amino acids, at least 100 consecutive amino acids, at least 120 consecutive amino acids, at least 140 consecutive amino acids, at least 160 consecutive amino acids, at least 180 consecutive amino acids, at least 200 consecutive amino acids, at least 220 consecutive amino acids, at least 240 consecutive amino acids, or 241 or more consecutive amino acids of a full-length NRPD2A/NRPE2 protein. In some embodiments, NRPD2A/NRPE2 protein fragments may include sequences with one or more amino acids removed from the consecutive amino acid sequence of a full-length NRPD2A/NRPE2 protein. In some embodiments, NRPD2A/NRPE2 protein fragments may include sequences with one or more amino acids replaced/substituted with an amino acid different from the endogenous amino acid present at a given amino acid position in a consecutive amino acid sequence of a full-length NRPD2A/NRPE2 protein. In some embodiments, NRPD2A/NRPE2 protein fragments may include sequences with one or more amino acids added to an otherwise consecutive amino acid sequence of a full-length NRPD2A/NRPE2 protein.

[0208] Suitable NRPD2A/NRPE2 proteins may be identified and isolated from monocot and dicot plants. Examples of such plants may include, for example, Arabidopsis spp., Ricinus communis, Glycine max, Zea Mays, Medicago truncatula, Physcomitrella patens, Sorghum bicolor, and Oryza sativa. Examples of suitable NRPD2A/NRPE2 proteins may include, for example, those listed in Table 9, homologs thereof, and orthologs thereof.

TABLE 9
NRPD2A/NRPE2 Proteins

| | | SED ID |
|---|---|---|
| Organism | Gene Name | NO. |
| Arabidopsis thaliana | Q9LK40 | 145 |
| Arabidopsis lyrata | XP_002883108.1 | 146 |
| Cucumis sativus | XP_004145500.1 | 147 |
| Vitis vinifera | CBI21137.3 | 148 |
| Medicago truncatula | AES73546.2 | 149 |
| Ricinus communis | XP_002515428.1 | 150 |
| Glycine max | XP_003523670.1 | 151 |
| Zea mays | NP_001177299 | 152 |
| Sorghum bicolor | XP_002468227 | 153 |
| Oryza sativa | NP_001054041 | 154 |
| Brachypodium distachyon | XP_003577435.2 | 155 |
| Populus trichocarpa | XP_002324332.2 | 156 |
| Brassica napus | CDX92193 | 157 |

[0209] In some embodiments, an NRPD2A/NRPE2 protein or fragment thereof of the present disclosure has an amino acid sequence with at least about 20%, at least about 25%, at least about 30%, at least about 40%, at least about 50%, at least about 55%, at least about 60%, at least about 65%, at least about 70%, at least about 75%, at least about 80%, at least about 85%, at least about 90%, at least about 91%, at least about 92%, at least about 93%, at least about 94%, at least about 95%, at least about 96%, at least about 97%, at least about 98%, at least about 99%, or at least about 100% amino acid identity to the amino acid sequence of the A. thaliana NRPD2A/NRPE2 protein (SEQ ID NO: 145).

[0210] An NRPD2A/NRPE2-like protein may include the amino acid sequence or a fragment thereof of any NRPD2A/NRPE2 homolog or ortholog, such as any one of those listed in Table 9. One of skill would readily recognize that additional NRPD2A/NRPE2 homologs and/or orthologs may exist and may be used herein.

[0211] NRPB3/NRPD3/NRPE3A Proteins

[0212] Certain aspects of the present disclosure relate to NRPB3/NRPD3/NRPE3A-like proteins. In some embodiments, an NRPB3/NRPD3/NRPE3A-like protein refers to a recombinant NRPB3/NRPD3/NRPE3A protein or fragment thereof and that contains a heterologous DNA-binding domain. In some embodiments, an NRPB3/NRPD3/NRPE3A-like protein refers to a recombinant NRPB3/NRPD3/NRPE3A protein or fragment thereof that is fused to a CAS9 protein or fragment thereof. In some embodiments, an NRPB3/NRPD3/NRPE3A-like protein refers to a recombinant NRPB3/NRPD3/NRPE3A protein or fragment thereof that is fused to an MS2 coat protein or fragment thereof. In some embodiments, an NRPB3/NRPD3/NRPE3A-like protein refers to a recombinant NRPB3/NRPD3/NRPE3A protein or fragment thereof that is fused to an scFV antibody or fragment thereof. NRPB3/NRPD3/NRPE3A-like proteins may be used in reducing the expression of one or more target nucleic acids, such as genes, in plants.

[0213] NRPB3/NRPD3/NRPE3A proteins are known in the art and are described herein. NRPB3, NRPD3, and NRPE3A are alternative names for the same protein, as is readily understood in the art. NRPB3/NRPD3/NRPE3A proteins encode a subunit of RNA Polymerases II, IV, and V. In some embodiments, an NRPB3/NRPD3/NRPE3A protein fragment contains at least 20 consecutive amino acids, at least 30 consecutive amino acids, at least 40 consecutive amino acids, at least 50 consecutive amino acids, at least 60 consecutive amino acids, at least 70 consecutive amino acids, at least 80 consecutive amino acids, at least 90 consecutive amino acids, at least 100 consecutive amino acids, at least 120 consecutive amino acids, at least 140 consecutive amino acids, at least 160 consecutive amino acids, at least 180 consecutive amino acids, at least 200 consecutive amino acids, at least 220 consecutive amino acids, at least 240 consecutive amino acids, or 241 or more consecutive amino acids of a full-length NRPB3/NRPD3/NRPE3A protein. In some embodiments, NRPB3/NRPD3/NRPE3A protein fragments may include sequences with one or more amino acids removed from the consecutive amino acid sequence of a full-length NRPB3/NRPD3/NRPE3A protein. In some embodiments, NRPB3/NRPD3/NRPE3A protein fragments may include sequences with one or more amino acids replaced/substituted with an amino acid different from the endogenous amino acid present at a given amino acid position in a consecutive amino acid sequence of a full-length NRPB3/NRPD3/NRPE3A protein. In some embodiments, NRPB3/NRPD3/NRPE3A protein fragments may include sequences with one or more amino acids added to an otherwise consecutive amino acid sequence of a full-length NRPB3/NRPD3/NRPE3A protein.

[0214] Suitable NRPB3/NRPD3/NRPE3A proteins may be identified and isolated from monocot and dicot plants. Examples of such plants may include, for example, Arabidopsis spp., Ricinus communis, Glycine max, Zea Mays, Medicago truncatula, Physcomitrella patens, Sorghum bicolor, and Oryza sativa. Examples of suitable NRPB3/NRPD3/NRPE3A proteins may include, for example, those listed in Table 10, homologs thereof, and orthologs thereof.

TABLE 10
NRPB3/NRPD3/NRPE3A Proteins

| | | SED ID |
|---|---|---|
| Organism | Gene Name | NO. |
| Arabidopsis thaliana | Q39211 | 158 |
| Arabidopsis lyrata | XP_002883895 | 159 |
| Cucumis sativus | XP_004138895 | 160 |
| Vitis vinifera | CAN60923 | 161 |
| Medicago truncatula | XP_003607895 | 162 |
| Ricinus communis | XP_002518700 | 163 |
| Glycine max | XP_003529425 | 164 |
| Zea mays | NP_001149261 | 165 |
| Sorghum bicolor | XP_002462055 | 166 |
| Oryza sativa | NP_001062572 | 167 |
| Brachypodium distachyon | XP_003576823 | 168 |
| Populus trichocarpa | XP_002313865 | 169 |
| Brassica napus | CDY62312 | 170 |

[0215] In some embodiments, an NRPB3/NRPD3/NRPE3A protein or fragment thereof of the present disclosure has an amino acid sequence with at least about 20%, at least about 25%, at least about 30%, at least about 40%, at least about 50%, at least about 55%, at least about 60%, at least about 65%, at least about 70%, at least about 75%, at least about 80%, at least about 85%, at least about 90%, at least about 91%, at least about 92%, at least about 93%, at least about 94%, at least about 95%, at least about 96%, at least about 97%, at least about 98%, at least about 99%, or at least about 100% amino acid identity to the amino acid sequence of the A. thaliana NRPB3/NRPD3/NRPE3A protein (SEQ ID NO: 158).

[0216] An NRPB3/NRPD3/NRPE3A-like protein may include the amino acid sequence or a fragment thereof of any NRPB3/NRPD3/NRPE3A homolog or ortholog, such as any one of those listed in Table 10. One of skill would readily recognize that additional NRPB3/NRPD3/NRPE3A homologs and/or orthologs may exist and may be used herein.

[0217] NRPE3B Proteins

[0218] Certain aspects of the present disclosure relate to NRPE3B-like proteins. In some embodiments, an NRPE3B-like protein refers to a recombinant NRPE3B protein or fragment thereof and that contains a heterologous DNA-binding domain. In some embodiments, an NRPE3B-like protein refers to a recombinant NRPE3B protein or fragment thereof that is fused to a CAS9 protein or fragment thereof. In some embodiments, an NRPE3B-like protein refers to a recombinant NRPE3B protein or fragment thereof that is fused to an MS2 coat protein or fragment thereof. In some embodiments, an NRPE3B-like protein refers to a recombinant NRPE3B protein or fragment thereof that is fused to an scFV antibody or fragment thereof. NRPE3B-like proteins may be used in reducing the expression of one or more target nucleic acids, such as genes, in plants.

[0219] NRPE3B proteins are known in the art and are described herein. NRPE3B proteins encode a subunit of RNA Pol V. In some embodiments, an NRPE3B protein fragment contains at least 20 consecutive amino acids, at least 30 consecutive amino acids, at least 40 consecutive amino acids, at least 50 consecutive amino acids, at least 60 consecutive amino acids, at least 70 consecutive amino acids, at least 80 consecutive amino acids, at least 90 consecutive amino acids, at least 100 consecutive amino acids, at least 120 consecutive amino acids, at least 140 consecutive amino acids, at least 160 consecutive amino acids, at least 180 consecutive amino acids, at least 200 consecutive amino acids, at least 220 consecutive amino acids, at least 240 consecutive amino acids, or 241 or more consecutive amino acids of a full-length NRPE3B protein. In some embodiments, NRPE3B protein fragments may include sequences with one or more amino acids removed from the consecutive amino acid sequence of a full-length NRPE3B protein. In some embodiments, NRPE3B protein fragments may include sequences with one or more amino acids replaced/substituted with an amino acid different from the endogenous amino acid present at a given amino acid position in a consecutive amino acid sequence of a full-length NRPE3B protein. In some embodiments, NRPE3B protein fragments may include sequences with one or more amino acids added to an otherwise consecutive amino acid sequence of a full-length NRPE3B protein.

[0220] Suitable NRPE3B proteins may be identified and isolated from monocot and dicot plants. Examples of such plants may include, for example, Arabidopsis spp., Ricinus communis, Glycine max, Zea Mays, Medicago truncatula, Physcomitrella patens, Sorghum bicolor, and Oryza sativa. Examples of suitable NRPE3B proteins may include, for example, those listed in Table 11, homologs thereof, and orthologs thereof.

TABLE 11
NRPE3B Proteins

| | | SED ID |
|---|---|---|
| Organism | Gene Name | NO. |
| Arabidopsis thaliana | Q39212 | 171 |
| Arabidopsis lyrata | XP_002883894 | 172 |
| Cucumis sativus | XP_004138895 | 173 |
| Vitis vinifera | CAN60923 | 174 |
| Medicago truncatula | XP_003607895 | 175 |
| Ricinus communis | XP_002518700 | 176 |
| Glycine max | XP_003529425 | 177 |
| Zea mays | NP_001149261 | 178 |
| Sorghum bicolor | XP_002462055 | 179 |
| Oryza sativa | XP_002960614 | 180 |
| Brachypodium distachyon | XP_003576823 | 181 |
| Populus trichocarpa | XP_002313865 | 182 |
| Brassica napus | CDY62312 | 183 |

[0221] In some embodiments, an NRPE3B protein or fragment thereof of the present disclosure has an amino acid sequence with at least about 20%, at least about 25%, at least about 30%, at least about 40%, at least about 50%, at least about 55%, at least about 60%, at least about 65%, at least about 70%, at least about 75%, at least about 80%, at least about 85%, at least about 90%, at least about 91%, at least about 92%, at least about 93%, at least about 94%, at least about 95%, at least about 96%, at least about 97%, at least about 98%, at least about 99%, or at least about 100% amino acid identity to the amino acid sequence of the A. thaliana NRPE3B protein (SEQ ID NO: 171).

[0222] An NRPE3B-like protein may include the amino acid sequence or a fragment thereof of any NRPE3B homolog or ortholog, such as any one of those listed in Table 11. One of skill would readily recognize that additional NRPE3B homologs and/or orthologs may exist and may be used herein.

[0223] NRPB11/NRPD11/NRPE11 Proteins

[0224] Certain aspects of the present disclosure relate to NRPB11/NRPD11/NRPE11-like proteins. In some embodiments, an NRPB11/NRPD11/NRPE11-like protein refers to a recombinant NRPB11/NRPD11/NRPE11 protein or fragment thereof and that contains a heterologous DNA-binding domain. In some embodiments, an NRPB11/NRPD11/NRPE11-like protein refers to a recombinant NRPB11/NRPD11/NRPE11 protein or fragment thereof that is fused to a CAS9 protein or fragment thereof. In some embodiments, an NRPB11/NRPD11/NRPE11-like protein refers to a recombinant NRPB11/NRPD11/NRPE11 protein or fragment thereof that is fused to an MS2 coat protein or fragment thereof. In some embodiments, an NRPB1/NRPD11/NRPE11-like protein refers to a recombinant NRPB11/NRPD11/NRPE11 protein or fragment thereof that is fused to an scFV antibody or fragment thereof. NRPB11/NRPD11/NRPE11-like proteins may be used in reducing the expression of one or more target nucleic acids, such as genes, in plants.

[0225] NRPB11/NRPD11/NRPE11 proteins are known in the art and are described herein. NRPB11, NRPD11, and NRPE11 are alternative names for the same protein, as is readily understood in the art. NRPB11/NRPD11/NRPE11 proteins encode a subunit of RNA Polymerases II, IV, and V. In some embodiments, an NRPB11/NRPD11/NRPE11 protein fragment contains at least 20 consecutive amino acids, at least 30 consecutive amino acids, at least 40 consecutive amino acids, at least 50 consecutive amino acids, at least 60 consecutive amino acids, at least 70 consecutive amino acids, at least 80 consecutive amino acids, at least 90 consecutive amino acids, at least 100 consecutive amino acids, at least 120 consecutive amino acids, at least 140 consecutive amino acids, at least 160 consecutive amino acids, at least 180 consecutive amino acids, at least 200 consecutive amino acids, at least 220 consecutive amino acids, at least 240 consecutive amino acids, or 241 or more consecutive amino acids of a full-length NRPB11/NRPD11/NRPE11 protein. In some embodiments, NRPB11/NRPD11/NRPE11 protein fragments may include sequences with one or more amino acids removed from the consecutive amino acid sequence of a full-length NRPB11/NRPD11/NRPE11 protein. In some embodiments, NRPB11/NRPD11/NRPE11 protein fragments may include sequences with one or more amino acids replaced/substituted with an amino acid different from the endogenous amino acid present at a given amino acid position in a consecutive amino acid sequence of a full-length NRPB11/NRPD11/NRPE11 protein. In some embodiments, NRPB11/NRPD11/NRPE11 protein fragments may include sequences with one or more amino acids added to an otherwise consecutive amino acid sequence of a full-length NRPB11/NRPD11/NRPE11 protein.

[0226] Suitable NRPB11/NRPD11/NRPE11 proteins may be identified and isolated from monocot and dicot plants. Examples of such plants may include, for example, Arabidopsis spp., Ricinus communis, Glycine max, Zea Mays, Medicago truncatula, Physcomitrella patens, Sorghum bicolor, and Oryza sativa. Examples of suitable NRPB11/NRPD11/NRPE11 proteins may include, for example, those listed in Table 12, homologs thereof, and orthologs thereof.

TABLE 12
NRPB11/NRPD11/NRPE11 Proteins

| | | SED ID |
|---|---|---|
| Organism | Gene Name | NO. |
| Arabidopsis thaliana | F4J5R0 | 184 |
| Arabidopsis lyrata | XP_002877842 | 185 |
| Cucumis sativus | XP_004149719 | 186 |
| Vitis vinifera | CAN70445 | 187 |
| Medicago truncatula | KEH24769 | 188 |
| Ricinus communis | XP_002517812 | 189 |
| Glycine max | XP_003534400 | 190 |
| Zea mays | XP_008681546 | 191 |
| Sorghum bicolor | XP_002447457 | 192 |
| Oryza sativa | NP_001058998 | 193 |
| Brachypodium distachyon | XP_003578343 | 194 |
| Populus trichocarpa | XP_002313254 | 195 |
| Brassica napus | CDY60635 | 196 |

[0227] In some embodiments, an NRPB11/NRPD11/NRPE11 protein or fragment thereof of the present disclosure has an amino acid sequence with at least about 20%, at least about 25%, at least about 30%, at least about 40%, at least about 50%, at least about 55%, at least about 60%, at least about 65%, at least about 70%, at least about 75%, at least about 80%, at least about 85%, at least about 90%, at least about 91%, at least about 92%, at least about 93%, at least about 94%, at least about 95%, at least about 96%, at least about 97%, at least about 98%, at least about 99%, or at least about 100% amino acid identity to the amino acid sequence of the A. thaliana NRPB11/NRPD11/NRPE11 protein (SEQ ID NO: 184).

[0228] An NRPB11/NRPD11/NRPE11-like protein may include the amino acid sequence or a fragment thereof of any NRPB11/NRPD11/NRPE11 homolog or ortholog, such as any one of those listed in Table 12. One of skill would readily recognize that additional NRPB11/NRPD11/NRPE11 homologs and/or orthologs may exist and may be used herein.

[0229] NRPB10/NRPD10/NRPE10 Proteins

[0230] Certain aspects of the present disclosure relate to NRPB10/NRPD10/NRPE10-like proteins. In some embodiments, an NRPB10/NRPD10/NRPE10-like protein refers to a recombinant NRPB10/NRPD10/NRPE10 protein or fragment thereof and that contains a heterologous DNA-binding domain. In some embodiments, an NRPB10/NRPD10/NRPE10-like protein refers to a recombinant NRPB10/NRPD10/NRPE10 protein or fragment thereof that is fused to a CAS9 protein or fragment thereof. In some embodiments, an NRPB10/NRPD10/NRPE10-like protein refers to a recombinant NRPB10/NRPD10/NRPE10 protein or fragment thereof that is fused to an MS2 coat protein or fragment thereof. In some embodiments, an NRPB10/NRPD10/NRPE10-like protein refers to a recombinant NRPB10/NRPD10/NRPE10 protein or fragment thereof that is fused to an scFV antibody or fragment thereof. NRPB10/NRPD10/NRPE10-like proteins may be used in reducing the expression of one or more target nucleic acids, such as genes, in plants.

[0231] NRPB10/NRPD10/NRPE10 proteins are known in the art and are described herein. NRPB10, NRPD10, and NRPE10 are alternative names for the same protein, as is readily understood in the art. NRPB10/NRPD10/NRPE10 proteins encode a subunit of RNA Polymerases II, IV, and V. In some embodiments, an NRPB10/NRPD10/NRPE10 protein fragment contains at least 20 consecutive amino acids, at least 30 consecutive amino acids, at least 40 consecutive amino acids, at least 50 consecutive amino acids, at least 60 consecutive amino acids, at least 70 consecutive amino acids, at least 80 consecutive amino acids, at least 90 consecutive amino acids, at least 100 consecutive amino acids, at least 120 consecutive amino acids, at least 140 consecutive amino acids, at least 160 consecutive amino acids, at least 180 consecutive amino acids, at least 200 consecutive amino acids, at least 220 consecutive amino acids, at least 240 consecutive amino acids, or 241 or more consecutive amino acids of a full-length NRPB10/NRPD10/NRPE10 protein. In some embodiments, NRPB10/NRPD10/NRPE10 protein fragments may include sequences with one or more amino acids removed from the consecutive amino acid sequence of a full-length NRPB10/NRPD10/NRPE10 protein. In some embodiments, NRPB10/NRPD10/NRPE10 protein fragments may include sequences with one or more amino acids replaced/substituted with an amino acid different from the endogenous amino acid present at a given amino acid position in a consecutive amino acid sequence of a full-length NRPB10/NRPD10/NRPE10 protein. In some embodiments, NRPB10/NRPD10/NRPE10 protein fragments may include sequences with one or more amino acids added to an otherwise consecutive amino acid sequence of a full-length NRPB10/NRPD10/NRPE10 protein.

[0232] Suitable NRPB10/NRPD10/NRPE10 proteins may be identified and isolated from monocot and dicot plants. Examples of such plants may include, for example, Arabidopsis spp., Ricinus communis, Glycine max, Zea Mays, Medicago truncatula, Physcomitrella patens, Sorghum bicolor, and Oryza sativa. Examples of suitable NRPB10/NRPD10/NRPE10 proteins may include, for example, those listed in Table 13, homologs thereof, and orthologs thereof.

TABLE 13
NRPB10/NRPD10/NRPE10 Proteins

| | | SED ID |
|---|---|---|
| Organism | Gene Name | NO. |
| Arabidopsis thaliana | Q8LFJ6 | 197 |
| Cucumis sativus | XP_004135479 | 198 |
| Vitis vinifera | XP_002263065 | 199 |
| Medicago truncatula | XP_003613211 | 200 |
| Ricinus communis | XP_002532739 | 201 |
| Glycine max | XP_003517695 | 202 |
| Zea mays | NP_001149707 | 203 |
| Sorghum bicolor | XP_002449154 | 204 |
| Oryza sativa | NP_001066312 | 205 |
| Brachypodium distachyon | XP_003578831 | 206 |
| Populus trichocarpa | XP_002303467 | 207 |
| Brassica napus | CDY25312 | 208 |

[0233] In some embodiments, an NRPB10/NRPD10/NRPE10 protein or fragment thereof of the present disclosure has an amino acid sequence with at least about 20%, at least about 25%, at least about 30%, at least about 40%, at least about 50%, at least about 55%, at least about 60%, at least about 65%, at least about 70%, at least about 75%, at least about 80%, at least about 85%, at least about 90%, at least about 91%, at least about 92%, at least about 93%, at least about 94%, at least about 95%, at least about 96%, at least about 97%, at least about 98%, at least about 99%, or at least about 100% amino acid identity to the amino acid sequence of the A. thaliana NRPB10/NRPD10/NRPE10 protein (SEQ ID NO: 197).

[0234] An NRPB10/NRPD10/NRPE10-like protein may include the amino acid sequence or a fragment thereof of any NRPB10/NRPD10/NRPE10 homolog or ortholog, such as any one of those listed in Table 13. One of skill would readily recognize that additional NRPB0/NRPD10/NRPE10 homologs and/or orthologs may exist and may be used herein.

[0235] NRPB12/NRPD12/NRPE12 Proteins

[0236] Certain aspects of the present disclosure relate to NRPB12/NRPD12/NRPE12-like proteins. In some embodiments, an NRPB12/NRPD12/NRPE12-like protein refers to a recombinant NRPB12/NRPD12/NRPE12 protein or fragment thereof and that contains a heterologous DNA-binding domain. In some embodiments, an NRPB12/NRPD12/NRPE12-like protein refers to a recombinant NRPB12/NRPD12/NRPE12 protein or fragment thereof that is fused to a CAS9 protein or fragment thereof. In some embodiments, an NRPB12/NRPD12/NRPE12-like protein refers to a recombinant NRPB12/NRPD12/NRPE12 protein or fragment thereof that is fused to an MS2 coat protein or fragment thereof. In some embodiments, an NRPB12/NRPD12/NRPE12-like protein refers to a recombinant NRPB12/NRPD12/NRPE12 protein or fragment thereof that is fused to an scFV antibody or fragment thereof. NRPB12/NRPD12/NRPE12-like proteins may be used in reducing the expression of one or more target nucleic acids, such as genes, in plants.

[0237] NRPB12/NRPD12/NRPE12 proteins are known in the art and are described herein. NRPB12, NRPD12, and NRPE12 are alternative names for the same protein, as is readily understood in the art. NRPB12/NRPD12/NRPE12 proteins encode a subunit of RNA Polymerases II, IV, and V. In some embodiments, an NRPB12/NRPD12/NRPE12 protein fragment contains at least 20 consecutive amino acids, at least 30 consecutive amino acids, at least 40 consecutive amino acids, at least 50 consecutive amino acids, at least 60 consecutive amino acids, at least 70 consecutive amino acids, at least 80 consecutive amino acids, at least 90 consecutive amino acids, at least 100 consecutive amino acids, at least 120 consecutive amino acids, at least 140 consecutive amino acids, at least 160 consecutive amino acids, at least 180 consecutive amino acids, at least 200 consecutive amino acids, at least 220 consecutive amino acids, at least 240 consecutive amino acids, or 241 or more consecutive amino acids of a full-length NRPB12/NRPD12/NRPE12 protein. In some embodiments, NRPB12/NRPD12/NRPE12 protein fragments may include sequences with one or more amino acids removed from the consecutive amino acid sequence of a full-length NRPB12/NRPD12/NRPE12 protein. In some embodiments, NRPB12/NRPD12/NRPE12 protein fragments may include sequences with one or more amino acids replaced/substituted with an amino acid different from the endogenous amino acid present at a given amino acid position in a consecutive amino acid sequence of a full-length NRPB12/NRPD12/NRPE12 protein. In some embodiments, NRPB12/NRPD12/NRPE12 protein fragments may include sequences with one or more amino acids added to an otherwise consecutive amino acid sequence of a full-length NRPB12/NRPD12/NRPE12 protein.

[0238] Suitable NRPB12/NRPD12/NRPE12 proteins may be identified and isolated from monocot and dicot plants. Examples of such plants may include, for example, Arabidopsis spp., Ricinus communis, Glycine max, Zea Mays, Medicago truncatula, Physcomitrella patens, and Oryza sativa. Examples of suitable NRPB12/NRPD12/NRPE12 proteins may include, for example, those listed in Table 14, homologs thereof, and orthologs thereof.

TABLE 14
NRPB12/NRPD12/NRPE12 Proteins

| | | SED ID |
|---|---|---|
| Organism | Gene Name | NO. |
| Arabidopsis thaliana | Q9FLM8 | 209 |
| Arabidopsis lyrata | XP_002870659 | 210 |
| Cucumis sativus | KGN64215 | 211 |
| Vitis vinifera | XP_010662206 | 212 |
| Medicago truncatula | AFK41236 | 213 |
| Ricinus communis | XP_002527516 | 214 |
| Glycine max | XP_003534102 | 215 |
| Zea mays | ACG30756 | 216 |
| Oryza sativa | NP_001172391 | 217 |
| Brachypodium distachyon | XP_003563174 | 218 |
| Populus trichocarpa | XP_002317630 | 219 |
| Brassica napus | CDY24079 | 220 |

[0239] In some embodiments, an NRPB12/NRPD12/NRPE12 protein or fragment thereof of the present disclosure has an amino acid sequence with at least about 20%, at least about 25%, at least about 30%, at least about 40%, at least about 50%, at least about 55%, at least about 60%, at least about 65%, at least about 70%, at least about 75%, at least about 80%, at least about 85%, at least about 90%, at least about 91%, at least about 92%, at least about 93%, at least about 94%, at least about 95%, at least about 96%, at least about 97%, at least about 98%, at least about 99%, or at least about 100% amino acid identity to the amino acid sequence of the A. thaliana NRPB12/NRPD12/NRPE12 protein (SEQ ID NO: 209).

[0240] An NRPB12/NRPD12/NRPE12-like protein may include the amino acid sequence or a fragment thereof of any NRPB12/NRPD12/NRPE12 homolog or ortholog, such as any one of those listed in Table 14. One of skill would readily recognize that additional NRPB12/NRPD12/NRPE12 homologs and/or orthologs may exist and may be used herein.

[0241] NRPB6A/NRPD6A/NRPE6A Proteins

[0242] Certain aspects of the present disclosure relate to NRPB6A/NRPD6A/NRPE6A-like proteins. In some embodiments, an NRPB6A/NRPD6A/NRPE6A-like protein refers to a recombinant NRPB6A/NRPD6A/NRPE6A protein or fragment thereof and that contains a heterologous DNA-binding domain. In some embodiments, an NRPB6A/NRPD6A/NRPE6A-like protein refers to a recombinant NRPB6A/NRPD6A/NRPE6A protein or fragment thereof that is fused to a CAS9 protein or fragment thereof. In some embodiments, an NRPB6A/NRPD6A/NRPE6A-like protein refers to a recombinant NRPB6A/NRPD6A/NRPE6A protein or fragment thereof that is fused to an MS2 coat protein or fragment thereof. In some embodiments, an NRPB6A/NRPD6A/NRPE6A-like protein refers to a recombinant NRPB6A/NRPD6A/NRPE6A protein or fragment thereof that is fused to an scFV antibody or fragment thereof. NRPB6A/NRPD6A/NRPE6A-like proteins may be used in reducing the expression of one or more target nucleic acids, such as genes, in plants.

[0243] NRPB6A/NRPD6A/NRPE6A proteins are known in the art and are described herein. NRPB6A, NRPD6A, and NRPE6A are alternative names for the same protein, as is readily understood in the art. NRPB6A/NRPD6A/NRPE6A proteins encode a subunit of RNA Polymerases II, IV, and V. In some embodiments, an NRPB6A/NRPD6A/NRPE6A protein fragment contains at least 20 consecutive amino acids, at least 30 consecutive amino acids, at least 40 consecutive amino acids, at least 50 consecutive amino acids, at least 60 consecutive amino acids, at least 70 consecutive amino acids, at least 80 consecutive amino acids, at least 90 consecutive amino acids, at least 100 consecutive amino acids, at least 120 consecutive amino acids, at least 140 consecutive amino acids, at least 160 consecutive amino acids, at least 180 consecutive amino acids, at least 200 consecutive amino acids, at least 220 consecutive amino acids, at least 240 consecutive amino acids, or 241 or more consecutive amino acids of a full-length NRPB6A/NRPD6A/NRPE6A protein. In some embodiments, NRPB6A/NRPD6A/NRPE6A protein fragments may include sequences with one or more amino acids removed from the consecutive amino acid sequence of a full-length NRPB6A/NRPD6A/NRPE6A protein. In some embodiments, NRPB6A/NRPD6A/NRPE6A protein fragments may include sequences with one or more amino acids replaced/substituted with an amino acid different from the endogenous amino acid present at a given amino acid position in a consecutive amino acid sequence of a full-length NRPB6A/NRPD6A/NRPE6A protein. In some embodiments, NRPB6A/NRPD6A/NRPE6A protein fragments may include sequences with one or more amino acids added to an otherwise consecutive amino acid sequence of a full-length NRPB6A/NRPD6A/NRPE6A protein.

[0244] Suitable NRPB6A/NRPD6A/NRPE6A proteins may be identified and isolated from monocot and dicot plants. Examples of such plants may include, for example, Arabidopsis spp., Ricinus communis, Glycine max, Zea Mays, Medicago truncatula, Physcomitrella patens, Sorghum bicolor, and Oryza sativa. Examples of suitable NRPB6A/NRPD6A/NRPE6A proteins may include, for example, those listed in Table 15, homologs thereof, and orthologs thereof.

TABLE 15
NRPB6A/NRPD6A/NRPE6A Proteins

| | | SED ID |
|---|---|---|
| Organism | Gene Name | NO. |
| Arabidopsis thaliana | Q9SJ96 | 221 |
| Arabidopsis lyrata | XP_002885765 | 222 |
| Cucumis sativus | XP_004136357 | 223 |
| Vitis vinifera | XP_002282723 | 224 |
| Medicago truncatula | XP_003625191 | 225 |
| Ricinus communis | XP_002510834 | 226 |
| Glycine max | XP_003536478 | 227 |
| Zea mays | ACF83139 | 228 |
| Sorghum bicolor | XP_002459814 | 229 |
| Oryza sativa | NP_001050570 | 230 |
| Brachypodium distachyon | XP_003575153 | 231 |
| Populus trichocarpa | XP_002322450 | 232 |
| Brassica napus | CDY30291 | 233 |

[0245] In some embodiments, an NRPB6A/NRPD6A/NRPE6A protein or fragment thereof of the present disclosure has an amino acid sequence with at least about 20%, at least about 25%, at least about 30%, at least about 40%, at least about 50%, at least about 55%, at least about 60%, at least about 65%, at least about 70%, at least about 75%, at least about 80%, at least about 85%, at least about 90%, at least about 91%, at least about 92%, at least about 93%, at least about 94%, at least about 95%, at least about 96%, at least about 97%, at least about 98%, at least about 99%, or at least about 100% amino acid identity to the amino acid sequence of the A. thaliana NRPB6A/NRPD6A/NRPE6A protein (SEQ ID NO: 221).

[0246] An NRPB6A/NRPD6A/NRPE6A-like protein may include the amino acid sequence or a fragment thereof of any NRPB6A/NRPD6A/NRPE6A homolog or ortholog, such as any one of those listed in Table 15. One of skill would readily recognize that additional NRPB6A/NRPD6A/NRPE6A homologs and/or orthologs may exist and may be used herein.

[0247] NRPB6B/NRPD6B/NRPE6B Proteins

[0248] Certain aspects of the present disclosure relate to NRPB6B/NRPD6B/NRPE6B-like proteins. In some embodiments, an NRPB6B/NRPD6B/NRPE6B-like protein refers to a recombinant NRPB6B/NRPD6B/NRPE6B protein or fragment thereof and that contains a heterologous DNA-binding domain. In some embodiments, an NRPB6B/NRPD6B/NRPE6B-like protein refers to a recombinant NRPB6B/NRPD6B/NRPE6B protein or fragment thereof that is fused to a CAS9 protein or fragment thereof. In some embodiments, an NRPB6B/NRPD6B/NRPE6B-like protein refers to a recombinant NRPB6B/NRPD6B/NRPE6B protein or fragment thereof that is fused to an MS2 coat protein or fragment thereof. In some embodiments, an NRPB6B/NRPD6B/NRPE6B-like protein refers to a recombinant NRPB6B/NRPD6B/NRPE6B protein or fragment thereof that is fused to an scFV antibody or fragment thereof. NRPB6B/NRPD6B/NRPE6B-like proteins may be used in reducing the expression of one or more target nucleic acids, such as genes, in plants.

[0249] NRPB6B/NRPD6B/NRPE6B proteins are known in the art and are described herein. NRPB6B, NRPD6B, and NRPE6B are alternative names for the same protein, as is readily understood in the art. NRPB6B/NRPD6B/NRPE6B proteins encode a subunit of RNA Polymerases II and V. In some embodiments, an NRPB6B/NRPD6B/NRPE6B protein fragment contains at least 20 consecutive amino acids, at least 30 consecutive amino acids, at least 40 consecutive amino acids, at least 50 consecutive amino acids, at least 60 consecutive amino acids, at least 70 consecutive amino acids, at least 80 consecutive amino acids, at least 90 consecutive amino acids, at least 100 consecutive amino acids, at least 120 consecutive amino acids, at least 140 consecutive amino acids, at least 160 consecutive amino acids, at least 180 consecutive amino acids, at least 200 consecutive amino acids, at least 220 consecutive amino acids, at least 240 consecutive amino acids, or 241 or more consecutive amino acids of a full-length NRPB6B/NRPD6B/NRPE6B protein. In some embodiments, NRPB6B/NRPD6B/NRPE6B protein fragments may include sequences with one or more amino acids removed from the consecutive amino acid sequence of a full-length NRPB6B/NRPD6B/NRPE6B protein. In some embodiments, NRPB6B/NRPD6B/NRPE6B protein fragments may include sequences with one or more amino acids replaced/substituted with an amino acid different from the endogenous amino acid present at a given amino acid position in a consecutive amino acid sequence of a full-length NRPB6B/NRPD6B/NRPE6B protein. In some embodiments, NRPB6B/NRPD6B/NRPE6B protein fragments may include sequences with one or more amino acids added to an otherwise consecutive amino acid sequence of a full-length NRPB6B/NRPD6B/NRPE6B protein.

[0250] Suitable NRPB6B/NRPD6B/NRPE6B proteins may be identified and isolated from monocot and dicot plants. Examples of such plants may include, for example, Arabidopsis spp., Ricinus communis, Glycine max, Zea Mays, Medicago truncatula, Physcomitrella patens, Sorghum bicolor, and Oryza sativa. Examples of suitable NRPB6B/NRPD6B/NRPE6B proteins may include, for example, those listed in Table 16, homologs thereof, and orthologs thereof.

TABLE 16
NRPB6B/NRPD6B/NRPE6B Proteins

| | | SED ID |
|---|---|---|
| Organism | Gene Name | NO. |
| Arabidopsis thaliana | Q9SJ96 | 234 |
| Arabidopsis lyrata | XP_002885765 | 235 |
| Cucumis sativus | XP_004140788 | 236 |
| Vitis vinifera | CAN62586 | 237 |
| Medicago truncatula | KEH17383 | 238 |
| Ricinus communis | XP_002510834 | 239 |
| Glycine max | XP_003536478 | 240 |
| Zea mays | ACG24540 | 241 |
| Sorghum bicolor | XP_002459814 | 242 |
| Oryza sativa | NP_001050570 | 243 |
| Brachypodium distachyon | XP_003575153 | 244 |
| Populus trichocarpa | XP_002322450 | 245 |
| Brassica napus | CDY30291 | 246 |

[0251] In some embodiments, an NRPB6B/NRPD6B/NRPE6B protein or fragment thereof of the present disclosure has an amino acid sequence with at least about 20%, at least about 25%, at least about 30%, at least about 40%, at least about 50%, at least about 55%, at least about 60%, at least about 65%, at least about 70%, at least about 75%, at least about 80%, at least about 85%, at least about 90%, at least about 91%, at least about 92%, at least about 93%, at least about 94%, at least about 95%, at least about 96%, at least about 97%, at least about 98%, at least about 99%, or at least about 100% amino acid identity to the amino acid sequence of the A. thaliana NRPB6B/NRPD6B/NRPE6B protein (SEQ ID NO: 234).

[0252] An NRPB6B/NRPD6B/NRPE6B-like protein may include the amino acid sequence or a fragment thereof of any NRPB6B/NRPD6B/NRPE6B homolog or ortholog, such as any one of those listed in Table 16. One of skill would readily recognize that additional NRPB6B/NRPD6B/NRPE6B homologs and/or orthologs may exist and may be used herein.

[0253] NRPB8A/NRPE8A Proteins

[0254] Certain aspects of the present disclosure relate to NRPB8A/NRPE8A-like proteins. In some embodiments, an NRPB8A/NRPE8A-like protein refers to a recombinant NRPB8A/NRPE8A protein or fragment thereof and that contains a heterologous DNA-binding domain. In some embodiments, an NRPB8A/NRPE8A-like protein refers to a recombinant NRPB8A/NRPE8A protein or fragment thereof that is fused to a CAS9 protein or fragment thereof. In some embodiments, an NRPB8A/NRPE8A-like protein refers to a recombinant NRPB8A/NRPE8A protein or fragment thereof that is fused to an MS2 coat protein or fragment thereof. In some embodiments, an NRPB8A/NRPE8A-like protein refers to a recombinant NRPB8A/NRPE8A protein or fragment thereof that is fused to an scFV antibody or fragment thereof. NRPB8A/NRPE8A-like proteins may be used in reducing the expression of one or more target nucleic acids, such as genes, in plants.

[0255] NRPB8A/NRPE8A proteins are known in the art and are described herein. NRPB8A and NRPE8A are alternative names for the same protein, as is readily understood in the art. NRPB8A/NRPE8A proteins encode a subunit of RNA Polymerases II and V. In some embodiments, an NRPB8A/NRPE8A protein fragment contains at least 20 consecutive amino acids, at least 30 consecutive amino acids, at least 40 consecutive amino acids, at least 50 consecutive amino acids, at least 60 consecutive amino acids, at least 70 consecutive amino acids, at least 80 consecutive amino acids, at least 90 consecutive amino acids, at least 100 consecutive amino acids, at least 120 consecutive amino acids, at least 140 consecutive amino acids, at least 160 consecutive amino acids, at least 180 consecutive amino acids, at least 200 consecutive amino acids, at least 220 consecutive amino acids, at least 240 consecutive amino acids, or 241 or more consecutive amino acids of a full-length NRPB8A/NRPE8A protein. In some embodiments, NRPB8A/NRPE8A protein fragments may include sequences with one or more amino acids removed from the consecutive amino acid sequence of a full-length NRPB8A/NRPE8A protein. In some embodiments, NRPB8A/NRPE8A protein fragments may include sequences with one or more amino acids replaced/substituted with an amino acid different from the endogenous amino acid present at a given amino acid position in a consecutive amino acid sequence of a full-length NRPB8A/NRPE8A protein. In some embodiments, NRPB8A/NRPE8A protein fragments may include sequences with one or more amino acids added to an otherwise consecutive amino acid sequence of a full-length NRPB8A/NRPE8A protein.

[0256] Suitable NRPB8A/NRPE8A proteins may be identified and isolated from monocot and dicot plants. Examples of such plants may include, for example, Arabidopsis spp., Ricinus communis, Glycine max, Zea Mays, Medicago truncatula, Physcomitrella patens, Sorghum bicolor, and Oryza sativa. Examples of suitable NRPB8A/NRPE8A proteins may include, for example, those listed in Table 17, homologs thereof, and orthologs thereof.

TABLE 17
NRPB8A/NRPE8A Proteins

| | | SED ID |
|---|---|---|
| Organism | Gene Name | NO. |
| Arabidopsis thaliana | O81097 | 247 |
| Arabidopsis lyrata | XP_002891800 | 248 |
| Cucumis sativus | XP_004149143 | 249 |
| Vitis vinifera | CAN73856 | 250 |
| Medicago truncatula | AFK42881 | 251 |
| Ricinus communis | XP_002530308 | 252 |
| Glycine max | NP_001237035 | 253 |
| Zea mays | NP_001147399 | 254 |
| Sorghum bicolor | XP_002466106 | 255 |
| Oryza sativa | NP_001051880 | 256 |
| Brachypodium distachyon | XP_010227253 | 257 |
| Populus trichocarpa | XP_006376377 | 258 |
| Brassica rapa | XP_009116628 | 259 |

[0257] In some embodiments, an NRPB8A/NRPE8A protein or fragment thereof of the present disclosure has an amino acid sequence with at least about 20%, at least about 25%, at least about 30%, at least about 40%, at least about 50%, at least about 55%, at least about 60%, at least about 65%, at least about 70%, at least about 75%, at least about 80%, at least about 85%, at least about 90%, at least about 91%, at least about 92%, at least about 93%, at least about 94%, at least about 95%, at least about 96%, at least about 97%, at least about 98%, at least about 99%, or at least about 100% amino acid identity to the amino acid sequence of the A. thaliana NRPB8A/NRPE8A protein (SEQ ID NO: 247).

[0258] An NRPB8A/NRPE8A-like protein may include the amino acid sequence or a fragment thereof of any NRPB8A/NRPE8A homolog or ortholog, such as any one of those listed in Table 17. One of skill would readily recognize that additional NRPB8A/NRPE8A homologs and/or orthologs may exist and may be used herein.

[0259] NRPB8B/NRPD8B/NRPE8B Proteins

[0260] Certain aspects of the present disclosure relate to NRPB8B/NRPD8B/NRPE8B-like proteins. In some embodiments, an NRPB8B/NRPD8B/NRPE8B-like protein refers to a recombinant NRPB8B/NRPD8B/NRPE8B protein or fragment thereof and that contains a heterologous DNA-binding domain. In some embodiments, an NRPB8B/NRPD8B/NRPE8B-like protein refers to a recombinant NRPB8B/NRPD8B/NRPE8B protein or fragment thereof that is fused to a CAS9 protein or fragment thereof. In some embodiments, an NRPB8B/NRPD8B/NRPE8B-like protein refers to a recombinant NRPB8B/NRPD8B/NRPE8B protein or fragment thereof that is fused to an MS2 coat protein or fragment thereof. In some embodiments, an NRPB8B/NRPD8B/NRPE8B-like protein refers to a recombinant NRPB8B/NRPD8B/NRPE8B protein or fragment thereof that is fused to an scFV antibody or fragment thereof. NRPB8B/NRPD8B/NRPE8B-like proteins may be used in reducing the expression of one or more target nucleic acids, such as genes, in plants.

[0261] NRPB8B/NRPD8B/NRPE8B proteins are known in the art and are described herein. NRPB8B, NRPD8B, and NRPE8B are alternative names for the same protein, as is readily understood in the art. NRPB8B/NRPD8B/NRPE8B proteins encode a subunit of RNA Polymerases II, IV, and V. In some embodiments, an NRPB8B/NRPD8B/NRPE8B protein fragment contains at least 20 consecutive amino acids, at least 30 consecutive amino acids, at least 40 consecutive amino acids, at least 50 consecutive amino acids, at least 60 consecutive amino acids, at least 70 consecutive amino acids, at least 80 consecutive amino acids, at least 90 consecutive amino acids, at least 100 consecutive amino acids, at least 120 consecutive amino acids, at least 140 consecutive amino acids, at least 160 consecutive amino acids, at least 180 consecutive amino acids, at least 200 consecutive amino acids, at least 220 consecutive amino acids, at least 240 consecutive amino acids, or 241 or more consecutive amino acids of a full-length NRPB8B/NRPD8B/NRPE8B protein. In some embodiments, NRPB8B/NRPD8B/NRPE8B protein fragments may include sequences with one or more amino acids removed from the consecutive amino acid sequence of a full-length NRPB8B/NRPD8B/NRPE8B protein. In some embodiments, NRPB8B/NRPD8B/NRPE8B protein fragments may include sequences with one or more amino acids replaced/substituted with an amino acid different from the endogenous amino acid present at a given amino acid position in a consecutive amino acid sequence of a full-length NRPB8B/NRPD8B/NRPE8B protein. In some embodiments, NRPB8B/NRPD8B/NRPE8B protein fragments may include sequences with one or more amino acids added to an otherwise consecutive amino acid sequence of a full-length NRPB8B/NRPD8B/NRPE8B protein.

[0262] Suitable NRPB8B/NRPD8B/NRPE8B proteins may be identified and isolated from monocot and dicot plants. Examples of such plants may include, for example, Arabidopsis spp., Ricinus communis, Glycine max, Zea Mays, Medicago truncatula, Physcomitrella patens, Sorghum bicolor, and Oryza sativa. Examples of suitable NRPB8B/NRPD8B/NRPE8B proteins may include, for example, those listed in Table 18, homologs thereof, and orthologs thereof.

TABLE 18
NRPB8B/NRPD8B/NRPE8B Proteins

| | | SED ID |
|---|---|---|
| Organism | Gene Name | NO. |
| Arabidopsis thaliana | O81097 | 260 |
| Arabidopsis lyrata | XP_002891800 | 261 |
| Cucumis sativus | XP_004149143 | 262 |
| Vitis vinifera | CAN73856 | 263 |
| Medicago truncatula | AFK42881 | 264 |
| Ricinus communis | XP_002530308 | 265 |
| Glycine max | NP_001237035 | 266 |
| Zea mays | NP_001147399 | 267 |
| Sorghum bicolor | XP_002466106 | 268 |
| Oryza sativa | NP_001051880 | 269 |
| Brachypodium distachyon | XP_010227253 | 270 |
| Populus trichocarpa | XP_006376377 | 271 |
| Brassica rapa | XP_009116628 | 272 |

[0263] In some embodiments, an NRPB8B/NRPD8B/NRPE8B protein or fragment thereof of the present disclosure has an amino acid sequence with at least about 20%, at least about 25%, at least about 30%, at least about 40%, at least about 50%, at least about 55%, at least about 60%, at least about 65%, at least about 70%, at least about 75%, at least about 80%, at least about 85%, at least about 90%, at least about 91%, at least about 92%, at least about 93%, at least about 94%, at least about 95%, at least about 96%, at least about 97%, at least about 98%, at least about 99%, or at least about 100% amino acid identity to the amino acid sequence of the A. thaliana NRPB8B/NRPD8B/NRPE8B protein (SEQ ID NO: 260).

[0264] An NRPB8B/NRPD8B/NRPE8B-like protein may include the amino acid sequence or a fragment thereof of any NRPB8B/NRPD8B/NRPE8B homolog or ortholog, such as any one of those listed in Table 18. One of skill would readily recognize that additional NRPB8B/NRPD8B/NRPE8B homologs and/or orthologs may exist and may be used herein.

[0265] NRPE5 Proteins

[0266] Certain aspects of the present disclosure relate to NRPE5-like proteins. In some embodiments, an NRPE5-like protein refers to a recombinant NRPE5 protein or fragment thereof and that contains a heterologous DNA-binding domain. In some embodiments, an NRPE5-like protein refers to a recombinant NRPE5 protein or fragment thereof that is fused to a CAS9 protein or fragment thereof. In some embodiments, an NRPE5-like protein refers to a recombinant NRPE5 protein or fragment thereof that is fused to an MS2 coat protein or fragment thereof. In some embodiments, an NRPE5-like protein refers to a recombinant NRPE5 protein or fragment thereof that is fused to an scFV antibody or fragment thereof. NRPE5-like proteins may be used in reducing the expression of one or more target nucleic acids, such as genes, in plants.

[0267] NRPE5 proteins are known in the art and are described herein. NRPE5 proteins encode a subunit of RNA Pol V. In some embodiments, an NRPE5 protein fragment contains at least 20 consecutive amino acids, at least 30 consecutive amino acids, at least 40 consecutive amino acids, at least 50 consecutive amino acids, at least 60 consecutive amino acids, at least 70 consecutive amino acids, at least 80 consecutive amino acids, at least 90 consecutive amino acids, at least 100 consecutive amino acids, at least 120 consecutive amino acids, at least 140 consecutive amino acids, at least 160 consecutive amino acids, at least 180 consecutive amino acids, at least 200 consecutive amino acids, at least 220 consecutive amino acids, at least 240 consecutive amino acids, or 241 or more consecutive amino acids of a full-length NRPE5 protein. In some embodiments, NRPE5 protein fragments may include sequences with one or more amino acids removed from the consecutive amino acid sequence of a full-length NRPE5 protein. In some embodiments, NRPE5 protein fragments may include sequences with one or more amino acids replaced/substituted with an amino acid different from the endogenous amino acid present at a given amino acid position in a consecutive amino acid sequence of a full-length NRPE5 protein. In some embodiments, NRPE5 protein fragments may include sequences with one or more amino acids added to an otherwise consecutive amino acid sequence of a full-length NRPE5 protein.

[0268] Suitable NRPE5 proteins may be identified and isolated from monocot and dicot plants. Examples of such plants may include, for example, Arabidopsis spp., Ricinus communis, Glycine max, Zea Mays, Medicago truncatula, Physcomitrella patens, Sorghum bicolor, and Oryza sativa. Examples of suitable NRPE5 proteins may include, for example, those listed in Table 19, homologs thereof, and orthologs thereof.

TABLE 19
NRPE5 Proteins

| | | SED ID |
|---|---|---|
| Organism | Gene Name | NO. |
| Arabidopsis thaliana | Q9M1J2 | 273 |
| Arabidopsis lyrata | XP_002876396.1 | 274 |
| Cucumis sativus | XP_004136650.1 | 275 |
| Vitis vinifera | XP_003632734 | 276 |
| Medicago truncatula | XP_003625033.1 | 277 |
| Ricinus communis | XP_002513077.1 | 278 |
| Glycine max | NP_001236527.1 | 279 |
| Zea mays | ACG37268 | 280 |
| Sorghum bicolor | XP_002450250.1 | 281 |
| Oryza sativa | NP_001066119.1 | 282 |
| Brachypodium distachyon | XP_010237978.1 | 283 |
| Populus trichocarpa | XP_002323257.2 | 284 |
| Brassica napus | CDX72073 | 285 |

[0269] In some embodiments, an NRPE5 protein or fragment thereof of the present disclosure has an amino acid sequence with at least about 20%, at least about 25%, at least about 30%, at least about 40%, at least about 50%, at least about 55%, at least about 60%, at least about 65%, at least about 70%, at least about 75%, at least about 80%, at least about 85%, at least about 90%, at least about 91%, at least about 92%, at least about 93%, at least about 94%, at least about 95%, at least about 96%, at least about 97%, at least about 98%, at least about 99%, or at least about 100% amino acid identity to the amino acid sequence of the A. thaliana NRPE5 protein (SEQ ID NO: 273).

[0270] An NRPE5-like protein may include the amino acid sequence or a fragment thereof of any NRPE5 homolog or ortholog, such as any one of those listed in Table 19. One of skill would readily recognize that additional NRPE5 homologs and/or orthologs may exist and may be used herein.

[0271] NRPD4/NRPE4 Proteins

[0272] Certain aspects of the present disclosure relate to NRPD4/NRPE4-like proteins. In some embodiments, an NRPD4/NRPE4-like protein refers to a recombinant NRPD4/NRPE4 protein or fragment thereof and that contains a heterologous DNA-binding domain. In some embodiments, an NRPD4/NRPE4-like protein refers to a recombinant NRPD4/NRPE4 protein or fragment thereof that is fused to a CAS9 protein or fragment thereof. In some embodiments, an NRPD4/NRPE4-like protein refers to a recombinant NRPD4/NRPE4 protein or fragment thereof that is fused to an MS2 coat protein or fragment thereof. In some embodiments, an NRPD4/NRPE4-like protein refers to a recombinant NRPD4/NRPE4 protein or fragment thereof that is fused to an scFV antibody or fragment thereof. NRPD4/NRPE4-like proteins may be used in reducing the expression of one or more target nucleic acids, such as genes, in plants.

[0273] NRPD4/NRPE4 proteins are known in the art and are described herein. NRPD4 and NRPE4 are alternative names for the same protein, as is readily understood in the art. NRPD4/NRPE4 proteins encode a subunit of RNA Polymerases IV and V. In some embodiments, an NRPD4/NRPE4 protein fragment contains at least 20 consecutive amino acids, at least 30 consecutive amino acids, at least 40 consecutive amino acids, at least 50 consecutive amino acids, at least 60 consecutive amino acids, at least 70 consecutive amino acids, at least 80 consecutive amino acids, at least 90 consecutive amino acids, at least 100 consecutive amino acids, at least 120 consecutive amino acids, at least 140 consecutive amino acids, at least 160 consecutive amino acids, at least 180 consecutive amino acids, at least 200 consecutive amino acids, at least 220 consecutive amino acids, at least 240 consecutive amino acids, or 241 or more consecutive amino acids of a full-length NRPD4/NRPE4 protein. In some embodiments, NRPD4/NRPE4 protein fragments may include sequences with one or more amino acids removed from the consecutive amino acid sequence of a full-length NRPD4/NRPE4 protein. In some embodiments, NRPD4/NRPE4 protein fragments may include sequences with one or more amino acids replaced/substituted with an amino acid different from the endogenous amino acid present at a given amino acid position in a consecutive amino acid sequence of a full-length NRPD4/NRPE4 protein. In some embodiments, NRPD4/NRPE4 protein fragments may include sequences with one or more amino acids added to an otherwise consecutive amino acid sequence of a full-length NRPD4/NRPE4 protein.

[0274] Suitable NRPD4/NRPE4 proteins may be identified and isolated from monocot and dicot plants. Examples of such plants may include, for example, Arabidopsis spp., Ricinus communis, Glycine max, Zea Mays, Medicago truncatula, Physcomitrella patens, Sorghum bicolor, and Oryza sativa. Examples of suitable NRPD4/NRPE4 proteins may include, for example, those listed in Table 20, homologs thereof, and orthologs thereof.

TABLE 20
NRPD4/NRPE4 Proteins

| | | SED ID |
|---|---|---|
| Organism | Gene Name | NO. |
| Arabidopsis thaliana | F4JKY1 | 286 |
| Arabidopsis lyrata | XP_002870197.1 | 287 |
| Cucumis sativus | KGN49020.1 | 288 |
| Vitis vinifera | XP_010646234 | 289 |
| Medicago truncatula | AFK45778.1 | 290 |
| Ricinus communis | XP_002525033.1 | 291 |
| Glycine max | XP_003534990.1 | 292 |
| Zea mays | NP_001130236.1 | 293 |
| Sorghum bicolor | XP_002453184 | 294 |
| Oryza sativa | BAH01271.1 | 295 |
| Brachypodiurn distachyon | XP_010236010.1 | 296 |
| Populus trichocarpa | XP_006373571.1 | 297 |
| Brassica napus | CDY37333 | 298 |

[0275] In some embodiments, an NRPD4/NRPE4 protein or fragment thereof of the present disclosure has an amino acid sequence with at least about 20%, at least about 25%, at least about 30%, at least about 40%, at least about 50%, at least about 55%, at least about 60%, at least about 65%, at least about 70%, at least about 75%, at least about 80%, at least about 85%, at least about 90%, at least about 91%, at least about 92%, at least about 93%, at least about 94%, at least about 95%, at least about 96%, at least about 97%, at least about 98%, at least about 99%, or at least about 100% amino acid identity to the amino acid sequence of the A. thaliana NRPD4/NRPE4 protein (SEQ ID NO: 286).

[0276] An NRPD4/NRPE4-like protein may include the amino acid sequence or a fragment thereof of any NRPD4/NRPE4 homolog or ortholog, such as any one of those listed in Table 20. One of skill would readily recognize that additional NRPD4/NRPE4 homologs and/or orthologs may exist and may be used herein.

[0277] NRPE7 Proteins

[0278] Certain aspects of the present disclosure relate to NRPE7-like proteins. In some embodiments, an NRPE7-like protein refers to a recombinant NRPE7 protein or fragment thereof and that contains a heterologous DNA-binding domain. In some embodiments, an NRPE7-like protein refers to a recombinant NRPE7 protein or fragment thereof that is fused to a CAS9 protein or fragment thereof. In some embodiments, an NRPE7-like protein refers to a recombinant NRPE7 protein or fragment thereof that is fused to an MS2 coat protein or fragment thereof. In some embodiments, an NRPE7-like protein refers to a recombinant NRPE7 protein or fragment thereof that is fused to an scFV antibody or fragment thereof. NRPE7-like proteins may be used in reducing the expression of one or more target nucleic acids, such as genes, in plants.

[0279] NRPE7 proteins are known in the art and are described herein. NRPE7 proteins encode a subunit of RNA Pol V. In some embodiments, an NRPE7 protein fragment contains at least 20 consecutive amino acids, at least 30 consecutive amino acids, at least 40 consecutive amino acids, at least 50 consecutive amino acids, at least 60 consecutive amino acids, at least 70 consecutive amino acids, at least 80 consecutive amino acids, at least 90 consecutive amino acids, at least 100 consecutive amino acids, at least 120 consecutive amino acids, at least 140 consecutive amino acids, at least 160 consecutive amino acids, at least 180 consecutive amino acids, at least 200 consecutive amino acids, at least 220 consecutive amino acids, at least 240 consecutive amino acids, or 241 or more consecutive amino acids of a full-length NRPE7 protein. In some embodiments, NRPE7 protein fragments may include sequences with one or more amino acids removed from the consecutive amino acid sequence of a full-length NRPE7 protein. In some embodiments, NRPE7 protein fragments may include sequences with one or more amino acids replaced/substituted with an amino acid different from the endogenous amino acid present at a given amino acid position in a consecutive amino acid sequence of a full-length NRPE7 protein. In some embodiments, NRPE7 protein fragments may include sequences with one or more amino acids added to an otherwise consecutive amino acid sequence of a full-length NRPE7 protein.

[0280] Suitable NRPE7 proteins may be identified and isolated from monocot and dicot plants. Examples of such plants may include, for example, Arabidopsis spp., Ricinus communis, Glycine max, Zea Mays, Medicago truncatula, Physcomitrella patens, Sorghum bicolor, and Oryza sativa. Examples of suitable NRPE7 proteins may include, for example, those listed in Table 21, homologs thereof, and orthologs thereof.

TABLE 21
NRPE7 Proteins

| | | SED ID |
|---|---|---|
| Organism | Gene Name | NO. |
| Arabidopsis thaliana | A6QRA1 | 299 |
| Arabidopsis lyrata | XP_002868270.1 | 300 |
| Cucumis sativus | XP_004150402.1 | 301 |
| Vitis vinifera | XP_002284221.1 | 302 |
| Medicago truncatula | AFK37080.1 | 303 |
| Ricinus communis | XP_002522607.1 | 304 |
| Glycine max | XP_006605321.1 | 305 |
| Zea mays | NP_001150375 | 306 |
| Sorghum bicolor | XP_002439325.1 | 307 |
| Oryza sativa | NP_001054703.1 | 308 |
| Brachypodium distachyon | XP_003568883.1 | 309 |
| Populus trichocarpa | XP_002312568.1 | 310 |
| Brassica napus | CDY40821 | 311 |

[0281] In some embodiments, an NRPE7 protein or fragment thereof of the present disclosure has an amino acid sequence with at least about 20%, at least about 25%, at least about 30%, at least about 40%, at least about 50%, at least about 55%, at least about 60%, at least about 65%, at least about 70%, at least about 75%, at least about 80%, at least about 85%, at least about 90%, at least about 91%, at least about 92%, at least about 93%, at least about 94%, at least about 95%, at least about 96%, at least about 97%, at least about 98%, at least about 99%, or at least about 100% amino acid identity to the amino acid sequence of the A. thaliana NRPE7 protein (SEQ ID NO: 299).

[0282] An NRPE7-like protein may include the amino acid sequence or a fragment thereof of any NRPE7 homolog or ortholog, such as any one of those listed in Table 21. One of skill would readily recognize that additional NRPE7 homologs and/or orthologs may exist and may be used herein.

[0283] NRPD7 Proteins

[0284] Certain aspects of the present disclosure relate to NRPD7-like proteins. In some embodiments, an NRPD7-like protein refers to a recombinant NRPD7 protein or fragment thereof and that contains a heterologous DNA-binding domain. In some embodiments, an NRPD7-like protein refers to a recombinant NRPD7 protein or fragment thereof that is fused to a CAS9 protein or fragment thereof. In some embodiments, an NRPD7-like protein refers to a recombinant NRPD7 protein or fragment thereof that is fused to an MS2 coat protein or fragment thereof. In some embodiments, an NRPD7-like protein refers to a recombinant NRPD7 protein or fragment thereof that is fused to an scFV antibody or fragment thereof. NRPD7-like proteins may be used in reducing the expression of one or more target nucleic acids, such as genes, in plants.

[0285] NRPD7 proteins are known in the art and are described herein. NRPD7 proteins encode a subunit of RNA Pol IV. In some embodiments, an NRPD7 protein fragment contains at least 20 consecutive amino acids, at least 30 consecutive amino acids, at least 40 consecutive amino acids, at least 50 consecutive amino acids, at least 60 consecutive amino acids, at least 70 consecutive amino acids, at least 80 consecutive amino acids, at least 90 consecutive amino acids, at least 100 consecutive amino acids, at least 120 consecutive amino acids, at least 140 consecutive amino acids, at least 160 consecutive amino acids, at least 180 consecutive amino acids, at least 200 consecutive amino acids, at least 220 consecutive amino acids, at least 240 consecutive amino acids, or 241 or more consecutive amino acids of a full-length NRPD7 protein. In some embodiments, NRPD7 protein fragments may include sequences with one or more amino acids removed from the consecutive amino acid sequence of a full-length NRPD7 protein. In some embodiments, NRPD7 protein fragments may include sequences with one or more amino acids replaced/substituted with an amino acid different from the endogenous amino acid present at a given amino acid position in a consecutive amino acid sequence of a full-length NRPD7 protein. In some embodiments, NRPD7 protein fragments may include sequences with one or more amino acids added to an otherwise consecutive amino acid sequence of a full-length NRPD7 protein.

[0286] Suitable NRPD7 proteins may be identified and isolated from monocot and dicot plants. Examples of such plants may include, for example, Arabidopsis spp., Ricinus communis, Glycine max, Zea Mays, Medicago truncatula, Physcomitrella patens, Sorghum bicolor, and Oryza sativa. Examples of suitable NRPD7 proteins may include, for example, those listed in Table 22, homologs thereof, and orthologs thereof.

TABLE 22
NRPD7 Proteins

| | | SED ID |
|---|---|---|
| Organism | Gene Name | NO. |
| Arabidopsis thaliana | Q8LE42 | 312 |
| Arabidopsis lyrata | XP_002883384.1 | 313 |
| Cucumis sativus | XP_004150402.1 | 314 |
| Vitis vinifera | XP_002284221.1 | 315 |
| Medicago truncatula | AFK37080.1 | 316 |
| Ricinus communis | XP_002522607.1 | 317 |
| Glycine max | XP_006605319.1 | 318 |
| Zea mays | NP_001150375 | 319 |
| Sorghum bicolor | XP_002439325 | 320 |
| Oryza sativa | EEC78737.1 | 321 |
| Brachypodium distachyon | XP_003568883 | 322 |
| Populus trichocarpa | XP_002312568 | 323 |
| Brassica napus | CDY40821 | 324 |

[0287] In some embodiments, an NRPD7 protein or fragment thereof of the present disclosure has an amino acid sequence with at least about 20%, at least about 25%, at least about 30%, at least about 40%, at least about 50%, at least about 55%, at least about 60%, at least about 65%, at least about 70%, at least about 75%, at least about 80%, at least about 85%, at least about 90%, at least about 91%, at least about 92%, at least about 93%, at least about 94%, at least about 95%, at least about 96%, at least about 97%, at least about 98%, at least about 99%, or at least about 100% amino acid identity to the amino acid sequence of the A. thaliana NRPD7 protein (SEQ ID NO: 312).

[0288] An NRPD7-like protein may include the amino acid sequence or a fragment thereof of any NRPD7 homolog or ortholog, such as any one of those listed in Table 22. One of skill would readily recognize that additional NRPD7 homologs and/or orthologs may exist and may be used herein.

[0289] NRPB5/NRPD5 Proteins

[0290] Certain aspects of the present disclosure relate to NRPB5/NRPD5-like proteins. In some embodiments, an NRPB5/NRPD5-like protein refers to a recombinant NRPB5/NRPD5 protein or fragment thereof and that contains a heterologous DNA-binding domain. In some embodiments, an NRPB5/NRPD5-like protein refers to a recombinant NRPB5/NRPD5 protein or fragment thereof that is fused to a CAS9 protein or fragment thereof. In some embodiments, an NRPB5/NRPD5-like protein refers to a recombinant NRPB5/NRPD5 protein or fragment thereof that is fused to an MS2 coat protein or fragment thereof. In some embodiments, an NRPB5/NRPD5-like protein refers to a recombinant NRPB5/NRPD5 protein or fragment thereof that is fused to an scFV antibody or fragment thereof. NRPB5/NRPD5-like proteins may be used in reducing the expression of one or more target nucleic acids, such as genes, in plants.

[0291] NRPB5/NRPD5 proteins are known in the art and are described herein. NRPB5 and NRPD5 are alternative names for the same protein, as is readily understood in the art. NRPB5/NRPD5 proteins encode a subunit of RNA Polymerases I, II, III, and IV. In some embodiments, an NRPB5/NRPD5 protein fragment contains at least 20 consecutive amino acids, at least 30 consecutive amino acids, at least 40 consecutive amino acids, at least 50 consecutive amino acids, at least 60 consecutive amino acids, at least 70 consecutive amino acids, at least 80 consecutive amino acids, at least 90 consecutive amino acids, at least 100 consecutive amino acids, at least 120 consecutive amino acids, at least 140 consecutive amino acids, at least 160 consecutive amino acids, at least 180 consecutive amino acids, at least 200 consecutive amino acids, at least 220 consecutive amino acids, at least 240 consecutive amino acids, or 241 or more consecutive amino acids of a full-length NRPB5/NRPD5 protein. In some embodiments, NRPB5/NRPD5 protein fragments may include sequences with one or more amino acids removed from the consecutive amino acid sequence of a full-length NRPB5/NRPD5 protein. In some embodiments, NRPB5/NRPD5 protein fragments may include sequences with one or more amino acids replaced/substituted with an amino acid different from the endogenous amino acid present at a given amino acid position in a consecutive amino acid sequence of a full-length NRPB5/NRPD5 protein. In some embodiments, NRPB5/NRPD5 protein fragments may include sequences with one or more amino acids added to an otherwise consecutive amino acid sequence of a full-length NRPB5/NRPD5 protein.

[0292] Suitable NRPB5/NRPD5 proteins may be identified and isolated from monocot and dicot plants. Examples of such plants may include, for example, Arabidopsis spp., Ricinus communis, Glycine max, Zea Mays, Medicago truncatula, Physcomitrella patens, Sorghum bicolor, and Oryza sativa. Examples of suitable NRPB5/NRPD5 proteins may include, for example, those listed in Table 23, homologs thereof, and orthologs thereof.

TABLE 23
NRPB5/NRPD5 Proteins

| | | SED ID |
|---|---|---|
| Organism | Gene Name | NO. |
| Arabidopsis thaliana | O81098 | 325 |
| Arabidopsis lyrata | XP_002885498 | 326 |
| Cucumis sativus | XP_004148944 | 327 |
| Vitis vinifera | XP_002284107 | 328 |
| Medicago truncatula | AFK41303 | 329 |
| Ricinus communis | XP_002514265 | 330 |
| Glycine max | NP_001238044 | 331 |
| Zea mays | NP_001132429 | 332 |
| Oryza sativa | NP_001044564 | 333 |
| Brachypodium distachyon | XP_003564430 | 334 |
| Populus trichocarpa | XP_002323257 | 335 |
| Brassica napus | CDY37407 | 336 |

[0293] In some embodiments, an NRPB5/NRPD5 protein or fragment thereof of the present disclosure has an amino acid sequence with at least about 20%, at least about 25%, at least about 30%, at least about 40%, at least about 50%, at least about 55%, at least about 60%, at least about 65%, at least about 70%, at least about 75%, at least about 80%, at least about 85%, at least about 90%, at least about 91%, at least about 92%, at least about 93%, at least about 94%, at least about 95%, at least about 96%, at least about 97%, at least about 98%, at least about 99%, or at least about 100% amino acid identity to the amino acid sequence of the A. thaliana NRPB5/NRPD5 protein (SEQ ID NO: 325).

[0294] An NRPB5/NRPD5-like protein may include the amino acid sequence or a fragment thereof of any NRPB5/NRPD5 homolog or ortholog, such as any one of those listed in Table 23. One of skill would readily recognize that additional NRPB5/NRPD5 homologs and/or orthologs may exist and may be used herein.

[0295] NRPB9A/NRPD9A/NRPE9A Proteins

[0296] Certain aspects of the present disclosure relate to NRPB9A/NRPD9A/NRPE9A-like proteins. In some embodiments, an NRPB9A/NRPD9A/NRPE9A-like protein refers to a recombinant NRPB9A/NRPD9A/NRPE9A protein or fragment thereof and that contains a heterologous DNA-binding domain. In some embodiments, an NRPB9A/NRPD9A/NRPE9A-like protein refers to a recombinant NRPB9A/NRPD9A/NRPE9A protein or fragment thereof that is fused to a CAS9 protein or fragment thereof. In some embodiments, an NRPB9A/NRPD9A/NRPE9A-like protein refers to a recombinant NRPB9A/NRPD9A/NRPE9A protein or fragment thereof that is fused to an MS2 coat protein or fragment thereof. In some embodiments, an NRPB9A/NRPD9A/NRPE9A-like protein refers to a recombinant NRPB9A/NRPD9A/NRPE9A protein or fragment thereof that is fused to an scFV antibody or fragment thereof. NRPB9A/NRPD9A/NRPE9A-like proteins may be used in reducing the expression of one or more target nucleic acids, such as genes, in plants.

[0297] NRPB9A/NRPD9A/NRPE9A proteins are known in the art and are described herein. NRPB9A, NRPD9A, and NRPE9A are alternative names for the same protein, as is readily understood in the art. NRPB9A/NRPD9A/NRPE9A proteins encode a subunit of RNA Polymerases II, IV, and V. In some embodiments, an NRPB9A/NRPD9A/NRPE9A protein fragment contains at least 20 consecutive amino acids, at least 30 consecutive amino acids, at least 40 consecutive amino acids, at least 50 consecutive amino acids, at least 60 consecutive amino acids, at least 70 consecutive amino acids, at least 80 consecutive amino acids, at least 90 consecutive amino acids, at least 100 consecutive amino acids, at least 120 consecutive amino acids, at least 140 consecutive amino acids, at least 160 consecutive amino acids, at least 180 consecutive amino acids, at least 200 consecutive amino acids, at least 220 consecutive amino acids, at least 240 consecutive amino acids, or 241 or more consecutive amino acids of a full-length NRPB9A/NRPD9A/NRPE9A protein. In some embodiments, NRPB9A/NRPD9A/NRPE9A protein fragments may include sequences with one or more amino acids removed from the consecutive amino acid sequence of a full-length NRPB9A/NRPD9A/NRPE9A protein. In some embodiments, NRPB9A/NRPD9A/NRPE9A protein fragments may include sequences with one or more amino acids replaced/substituted with an amino acid different from the endogenous amino acid present at a given amino acid position in a consecutive amino acid sequence of a full-length NRPB9A/NRPD9A/NRPE9A protein. In some embodiments, NRPB9A/NRPD9A/NRPE9A protein fragments may include sequences with one or more amino acids added to an otherwise consecutive amino acid sequence of a full-length NRPB9A/NRPD9A/NRPE9A protein.

[0298] Suitable NRPB9A/NRPD9A/NRPE9A proteins may be identified and isolated from monocot and dicot plants. Examples of such plants may include, for example, Arabidopsis spp., Ricinus communis, Glycine max, Zea Mays, Medicago truncatula, Physcomitrella patens, Sorghum bicolor, and Oryza sativa. Examples of suitable NRPB9A/NRPD9A/NRPE9A proteins may include, for example, those listed in Table 24, homologs thereof, and orthologs thereof.

TABLE 24
NRPB9A/NRPD9A/NRPE9A Proteins

| | | SED ID |
|---|---|---|
| Organism | Gene Name | NO. |
| Arabidopsis thaliana | Q6NLH0 | 337 |
| Arabidopsis lyrata | XP_002883036 | 338 |
| Cucumis melo | XP_008438942 | 339 |
| Vitis vinifera | XP_002276956 | 340 |
| Medicago truncatula | XP_003594777 | 341 |
| Ricinus communis | XP_002519205 | 342 |
| Glycine max | NP_001235803 | 343 |
| Zea mays | NP_001150634 | 344 |
| Sorghum bicolor | XP_002443356 | 345 |
| Oryza sativa | ABA98929 | 346 |
| Brachypodium distachyon | XP_003579291 | 347 |
| Populus trichocarpa | XP_002312337 | 348 |
| Brassica napus | CDX86852 | 349 |

[0299] In some embodiments, an NRPB9A/NRPD9A/NRPE9A protein or fragment thereof of the present disclosure has an amino acid sequence with at least about 20%, at least about 25%, at least about 30%, at least about 40%, at least about 50%, at least about 55%, at least about 60%, at least about 65%, at least about 70%, at least about 75%, at least about 80%, at least about 85%, at least about 90%, at least about 91%, at least about 92%, at least about 93%, at least about 94%, at least about 95%, at least about 96%, at least about 97%, at least about 98%, at least about 99%, or at least about 100% amino acid identity to the amino acid sequence of the A. thaliana NRPB9A/NRPD9A/NRPE9A protein (SEQ ID NO: 337).

[0300] An NRPB9A/NRPD9A/NRPE9A-like protein may include the amino acid sequence or a fragment thereof of any NRPB9A/NRPD9A/NRPE9A homolog or ortholog, such as any one of those listed in Table 24. One of skill would readily recognize that additional NRPB9A/NRPD9A/NRPE9A homologs and/or orthologs may exist and may be used herein.

[0301] NRPB9B/NRPD9B/NRPE9B Proteins

[0302] Certain aspects of the present disclosure relate to NRPB9B/NRPD9B/NRPE9B-like proteins. In some embodiments, an NRPB9B/NRPD9B/NRPE9B-like protein refers to a recombinant NRPB9B/NRPD9B/NRPE9B protein or fragment thereof and that contains a heterologous DNA-binding domain. In some embodiments, an NRPB9B/NRPD9B/NRPE9B-like protein refers to a recombinant NRPB9B/NRPD9B/NRPE9B protein or fragment thereof that is fused to a CAS9 protein or fragment thereof. In some embodiments, an NRPB9B/NRPD9B/NRPE9B-like protein refers to a recombinant NRPB9B/NRPD9B/NRPE9B protein or fragment thereof that is fused to an MS2 coat protein or fragment thereof. In some embodiments, an NRPB9B/NRPD9B/NRPE9B-like protein refers to a recombinant NRPB9B/NRPD9B/NRPE9B protein or fragment thereof that is fused to an scFV antibody or fragment thereof. NRPB9B/NRPD9B/NRPE9B-like proteins may be used in reducing the expression of one or more target nucleic acids, such as genes, in plants.

[0303] NRPB9B/NRPD9B/NRPE9B proteins are known in the art and are described herein. NRPB9B, NRPD9B, and NRPE9B are alternative names for the same protein, as is readily understood in the art. NRPB9B/NRPD9B/NRPE9B proteins encode a subunit of RNA Polymerases II, IV, and V. In some embodiments, an NRPB9B/NRPD9B/NRPE9B protein fragment contains at least 20 consecutive amino acids, at least 30 consecutive amino acids, at least 40 consecutive amino acids, at least 50 consecutive amino acids, at least 60 consecutive amino acids, at least 70 consecutive amino acids, at least 80 consecutive amino acids, at least 90 consecutive amino acids, at least 100 consecutive amino acids, at least 120 consecutive amino acids, at least 140 consecutive amino acids, at least 160 consecutive amino acids, at least 180 consecutive amino acids, at least 200 consecutive amino acids, at least 220 consecutive amino acids, at least 240 consecutive amino acids, or 241 or more consecutive amino acids of a full-length NRPB9B/NRPD9B/NRPE9B protein. In some embodiments, NRPB9B/NRPD9B/NRPE9B protein fragments may include sequences with one or more amino acids removed from the consecutive amino acid sequence of a full-length NRPB9B/NRPD9B/NRPE9B protein. In some embodiments, NRPB9B/NRPD9B/NRPE9B protein fragments may include sequences with one or more amino acids replaced/substituted with an amino acid different from the endogenous amino acid present at a given amino acid position in a consecutive amino acid sequence of a full-length NRPB9B/NRPD9B/NRPE9B protein. In some embodiments, NRPB9B/NRPD9B/NRPE9B protein fragments may include sequences with one or more amino acids added to an otherwise consecutive amino acid sequence of a full-length NRPB9B/NRPD9B/NRPE9B protein.

[0304] Suitable NRPB9B/NRPD9B/NRPE9B proteins may be identified and isolated from monocot and dicot plants. Examples of such plants may include, for example, Arabidopsis spp., Ricinus communis, Glycine max, Zea Mays, Medicago truncatula, Physcomitrella patens, Sorghum bicolor, and Oryza sativa. Examples of suitable NRPB9B/NRPD9B/NRPE9B proteins may include, for example, those listed in Table 25, homologs thereof, and orthologs thereof.

TABLE 25
NRPB9B/NRPD9B/NRPE9B Proteins

| | | SED ID |
|---|---|---|
| Organism | Gene Name | NO. |
| Arabidopsis thaliana | Q8L5V0 | 350 |
| Arabidopsis lyrata | XP_002883036 | 351 |
| Cucumis melo | XP_008438942 | 352 |
| Vitis vinifera | XP_002276956 | 353 |
| Medicago truncatula | XP_003594777 | 354 |
| Ricinus communis | XP_002519205 | 355 |
| Glycine max | NP_001235803 | 356 |
| Zea mays | NP_001150634 | 357 |
| Sorghum bicolor | XP_002443356 | 358 |
| Oryza sativa | ABA98929 | 359 |
| Brachypodium distachyon | XP_003559043 | 360 |
| Populus trichocarpa | XP_002312337 | 361 |
| Brassica napus | CDX99562 | 362 |

[0305] In some embodiments, an NRPB9B/NRPD9B/NRPE9B protein or fragment thereof of the present disclosure has an amino acid sequence with at least about 20%, at least about 25%, at least about 30%, at least about 40%, at least about 50%, at least about 55%, at least about 60%, at least about 65%, at least about 70%, at least about 75%, at least about 80%, at least about 85%, at least about 90%, at least about 91%, at least about 92%, at least about 93%, at least about 94%, at least about 95%, at least about 96%, at least about 97%, at least about 98%, at least about 99%, or at least about 100% amino acid identity to the amino acid sequence of the A. thaliana NRPB9B/NRPD9B/NRPE9B protein (SEQ ID NO: 350).

[0306] An NRPB9B/NRPD9B/NRPE9B-like protein may include the amino acid sequence or a fragment thereof of any NRPB9B/NRPD9B/NRPE9B homolog or ortholog, such as any one of those listed in Table 25. One of skill would readily recognize that additional NRPB9B/NRPD9B/NRPE9B homologs and/or orthologs may exist and may be used herein.

[0307] SUVH2 Proteins

[0308] Certain aspects of the present disclosure relate to SUVH2-like proteins. In some embodiments, a SUVH2-like protein refers to a recombinant SUVH2 protein or fragment thereof and that contains a heterologous DNA-binding domain. In some embodiments, a SUVH2-like protein refers to a recombinant SUVH2 protein or fragment thereof that is fused to a CAS9 protein or fragment thereof. In some embodiments, a SUVH2-like protein refers to a recombinant SUVH2 protein or fragment thereof that is fused to an MS2 coat protein or fragment thereof. In some embodiments, a SUVH2-like protein refers to a recombinant SUVH2 protein or fragment thereof that is fused to an scFV antibody or fragment thereof. SUVH2-like proteins may be used in reducing the expression of one or more target nucleic acids, such as genes, in plants.

[0309] SUVH2 proteins are known in the art and are described herein. In some embodiments, a SUVH2 protein fragment contains at least 20 consecutive amino acids, at least 30 consecutive amino acids, at least 40 consecutive amino acids, at least 50 consecutive amino acids, at least 60 consecutive amino acids, at least 70 consecutive amino acids, at least 80 consecutive amino acids, at least 90 consecutive amino acids, at least 100 consecutive amino acids, at least 120 consecutive amino acids, at least 140 consecutive amino acids, at least 160 consecutive amino acids, at least 180 consecutive amino acids, at least 200 consecutive amino acids, at least 220 consecutive amino acids, at least 240 consecutive amino acids, or 241 or more consecutive amino acids of a full-length SUVH2 protein. In some embodiments, SUVH2 protein fragments may include sequences with one or more amino acids removed from the consecutive amino acid sequence of a full-length SUVH2 protein. In some embodiments, SUVH2 protein fragments may include sequences with one or more amino acids replaced/substituted with an amino acid different from the endogenous amino acid present at a given amino acid position in a consecutive amino acid sequence of a full-length SUVH2 protein. In some embodiments, SUVH2 protein fragments may include sequences with one or more amino acids added to an otherwise consecutive amino acid sequence of a full-length SUVH2 protein.

[0310] Suitable SUVH2 proteins may be identified and isolated from monocot and dicot plants. Examples of such plants may include, for example, Arabidopsis spp., Ricinus communis, Glycine max, Zea Mays, Medicago truncatula, Physcomitrella patens, Sorghum bicolor, and Oryza sativa. Examples of suitable SUVH2 proteins may include, for example, those listed in Table 26, homologs thereof, and orthologs thereof.

TABLE 26
SUVH2 Proteins

| | | SEQ ID |
|---|---|---|
| Organism | Gene Name | NO. |
| Arabidopsis thaliana | NP_180887.1 | 504 |
| Ricinus communis | XP_002528332.1 | 505 |
| Glycine max | XP_003530311.1 | 506 |
| Zea mays | DAA60407.1 | 507 |
| Medicago truncatula | XP_003619209.1 | 508 |
| Physcomitrella patens | XP_001753516.1 | 509 |
| Sorghum bicolor | XP_002459773.1 | 510 |
| Oryza sativa | EAZ03669.1 | 511 |
| Brachypodium distachyon | XP_003563196.1 | 512 |
| Populus trichocarpa | XP_002315593.1 | 513 |
| Vitis vinifera | XP_002282386.1 | 514 |
| Cucumis sativus | XP_004134031.1 | 515 |
| Arabidopsis lyrata | XP_002879445.1 | 516 |

[0311] In some embodiments, a SUVH2 protein or fragment thereof of the present disclosure has an amino acid sequence with at least about 20%, at least about 25%, at least about 30%, at least about 40%, at least about 50%, at least about 55%, at least about 60%, at least about 65%, at least about 70%, at least about 75%, at least about 80%, at least about 85%, at least about 90%, at least about 91%, at least about 92%, at least about 93%, at least about 94%, at least about 95%, at least about 96%, at least about 97%, at least about 98%, at least about 99%, or at least about 100% amino acid identity to the amino acid sequence of the A. thaliana SUVH2 protein (SEQ ID NO: 504).

[0312] A SUVH2-like protein may include the amino acid sequence or a fragment thereof of any SUVH2 homolog or ortholog, such as any one of those listed in Table 26. One of skill would readily recognize that additional SUVH2 homologs and/or orthologs may exist and may be used herein.

[0313] SUVH9 Proteins

[0314] Certain aspects of the present disclosure relate to SUVH9-like proteins. In some embodiments, a SUVH9-like protein refers to a recombinant SUVH9 protein or fragment thereof and that contains a heterologous DNA-binding domain. In some embodiments, a SUVH9-like protein refers to a recombinant SUVH9 protein or fragment thereof that is fused to a CAS9 protein or fragment thereof. In some embodiments, a SUVH9-like protein refers to a recombinant SUVH9 protein or fragment thereof that is fused to an MS2 coat protein or fragment thereof. In some embodiments, a SUVH9-like protein refers to a recombinant SUVH9 protein or fragment thereof that is fused to an scFV antibody or fragment thereof. SUVH9-like proteins may be used in reducing the expression of one or more target nucleic acids, such as genes, in plants.

[0315] SUVH9 proteins are known in the art and are described herein. In some embodiments, a SUVH9 protein fragment contains at least 20 consecutive amino acids, at least 30 consecutive amino acids, at least 40 consecutive amino acids, at least 50 consecutive amino acids, at least 60 consecutive amino acids, at least 70 consecutive amino acids, at least 80 consecutive amino acids, at least 90 consecutive amino acids, at least 100 consecutive amino acids, at least 120 consecutive amino acids, at least 140 consecutive amino acids, at least 160 consecutive amino acids, at least 180 consecutive amino acids, at least 200 consecutive amino acids, at least 220 consecutive amino acids, at least 240 consecutive amino acids, or 241 or more consecutive amino acids of a full-length SUVH9 protein. In some embodiments, SUVH9 protein fragments may include sequences with one or more amino acids removed from the consecutive amino acid sequence of a full-length SUVH9 protein. In some embodiments, SUVH9 protein fragments may include sequences with one or more amino acids replaced/substituted with an amino acid different from the endogenous amino acid present at a given amino acid position in a consecutive amino acid sequence of a full-length SUVH9 protein. In some embodiments, SUVH9 protein fragments may include sequences with one or more amino acids added to an otherwise consecutive amino acid sequence of a full-length SUVH9 protein.

[0316] Suitable SUVH9 proteins may be identified and isolated from monocot and dicot plants. Examples of such plants may include, for example, Arabidopsis spp., Ricinus communis, Glycine max, Zea Mays, Medicago truncatula, Physcomitrella patens, Sorghum bicolor, and Oryza sativa. Examples of suitable SUVH9 proteins may include, for example, those listed in Table 27, homologs thereof, and orthologs thereof.

TABLE 27
SUVH9 Proteins

| | | SEQ ID |
|---|---|---|
| Organism | Gene Name | NO: |
| Arabidopsis thaliana | AF344452.1 | 517 |
| Ricinus communis | XP_002528332.1 | 518 |
| Glycine max | XP_003530311.1 | 519 |
| Zea mays | DAA60407.1 | 520 |
| Medicago truncatula | XP_003619209.1 | 521 |
| Physcomitrella patens | XP_001753516.1 | 522 |
| Sorghum bicolor | XP_002459773.1 | 523 |
| Oryza sativa | EAZ03669.1 | 524 |
| Brachypodium distachyon | XP_003563196.1 | 525 |
| Populus trichocarpa | XP_002315593.1 | 526 |
| Vitis vinifera | XP_002282386.1 | 527 |
| Cucumis sativus | XP_004134031.1 | 528 |
| Arabidopsis lyrata | XP_002863127.1 | 529 |

[0317] In some embodiments, a SUVH9 protein or fragment thereof of the present disclosure has an amino acid sequence with at least about 20%, at least about 25%, at least about 30%, at least about 40%, at least about 50%, at least about 55%, at least about 60%, at least about 65%, at least about 70%, at least about 75%, at least about 80%, at least about 85%, at least about 90%, at least about 91%, at least about 92%, at least about 93%, at least about 94%, at least about 95%, at least about 96%, at least about 97%, at least about 98%, at least about 99%, or at least about 100% amino acid identity to the amino acid sequence of the A. thaliana SUVH9 protein (SEQ ID NO: 517).

[0318] A SUVH9-like protein may include the amino acid sequence or a fragment thereof of any SUVH9 homolog or ortholog, such as any one of those listed in Table 27. One of skill would readily recognize that additional SUVH9 homologs and/or orthologs may exist and may be used herein.

[0319] SUVH2 and SUVH9 proteins of the present disclosure are SU-VAR (3-9) Homologs. Full-length SUVH2 and SUVH9 proteins contain a two-helix bundle domain towards the N-terminus, a SRA domain, and the pre-SET and SET domains towards the C-terminus. The structural and sequence features of the SUVH domains are known in the art and are provided herein. In some embodiments, SUVH2-like proteins and/or SUVH9-like proteins of the present disclosure may contain one or more of the canonical SUVH domains including a two-helix bundle domain, a SRA domain, a pre-SET domain, and/or a SET domain.

[0320] DMS3 Proteins

[0321] Certain aspects of the present disclosure relate to DMS3-like proteins. In some embodiments, a DMS3-like protein refers to a recombinant DMS3 protein or fragment thereof and that contains a heterologous DNA-binding domain. In some embodiments, a DMS3-like protein refers to a recombinant DMS3 protein or fragment thereof that is fused to a CAS9 protein or fragment thereof. In some embodiments, a DMS3-like protein refers to a recombinant DMS3 protein or fragment thereof that is fused to an MS2 coat protein or fragment thereof. In some embodiments, a DMS3-like protein refers to a recombinant DMS3 protein or fragment thereof that is fused to an scFV antibody or fragment thereof. DMS3-like proteins may be used in reducing the expression of one or more target nucleic acids, such as genes, in plants.

[0322] DMS3 proteins are known in the art and are described herein. In some embodiments, a DMS3 protein fragment contains at least 20 consecutive amino acids, at least 30 consecutive amino acids, at least 40 consecutive amino acids, at least 50 consecutive amino acids, at least 60 consecutive amino acids, at least 70 consecutive amino acids, at least 80 consecutive amino acids, at least 90 consecutive amino acids, at least 100 consecutive amino acids, at least 120 consecutive amino acids, at least 140 consecutive amino acids, at least 160 consecutive amino acids, at least 180 consecutive amino acids, at least 200 consecutive amino acids, at least 220 consecutive amino acids, at least 240 consecutive amino acids, or 241 or more consecutive amino acids of a full-length DMS3 protein. In some embodiments, DMS3 protein fragments may include sequences with one or more amino acids removed from the consecutive amino acid sequence of a full-length DMS3 protein. In some embodiments, DMS3 protein fragments may include sequences with one or more amino acids replaced/substituted with an amino acid different from the endogenous amino acid present at a given amino acid position in a consecutive amino acid sequence of a full-length DMS3 protein. In some embodiments, DMS3 protein fragments may include sequences with one or more amino acids added to an otherwise consecutive amino acid sequence of a full-length DMS3 protein.

[0323] Suitable DMS3 proteins may be identified and isolated from monocot and dicot plants. Examples of such plants may include, for example, Arabidopsis spp., Ricinus communis, Glycine max, Zea Mays, Medicago truncatula, Physcomitrella patens, Sorghum bicolor, and Oryza sativa. Examples of suitable DMS3 proteins may include, for example, those listed in Table 28, homologs thereof, and orthologs thereof.

TABLE 28
DMS3 Proteins

| | | SEQ ID |
|---|---|---|
| Organism | Gene Name | NO: |
| Arabidopsis thaliana | DMS3 | 531 |
| Solanum lycopersicum | XP_004234924.1 | 532 |
| Solanum tuberosum | XP_006350630.1 | 533 |
| Phaseolus vulgaris | ESW19314.1 | 534 |
| Vitis vinifera | XP_002277586.1 | 535 |
| Theobroma cacao | EOY23566.1 | 536 |
| Glycine max | XP_003550866.1 | 537 |
| Oriza sativa Japonica group | NP_001042520.1 | 538 |
| Oriza sativa Indica group | EEC70256.1 | 539 |
| Zea mays | NP_001132336.1 | 540 |
| Sorghum bicolor | XP_002454876.1 | 541 |

[0324] In some embodiments, a DMS3 protein or fragment thereof of the present disclosure has an amino acid sequence with at least about 20%, at least about 25%, at least about 30%, at least about 40%, at least about 50%, at least about 55%, at least about 60%, at least about 65%, at least about 70%, at least about 75%, at least about 80%, at least about 85%, at least about 90%, at least about 91%, at least about 92%, at least about 93%, at least about 94%, at least about 95%, at least about 96%, at least about 97%, at least about 98%, at least about 99%, or at least about 100% amino acid identity to the amino acid sequence of the A. thaliana DMS3 protein (SEQ ID NO: 531).

[0325] A DMS3-like protein may include the amino acid sequence or a fragment thereof of any DMS3 homolog or ortholog, such as, for example, any one of those listed in Table 28. One of skill would readily recognize that additional DMS3 homologs and/or orthologs may exist and may be used herein.

[0326] MORC6 Proteins

[0327] Certain aspects of the present disclosure relate to MORC6-like proteins. In some embodiments, a MORC6-like protein refers to a recombinant MORC6 protein or fragment thereof and that contains a heterologous DNA-binding domain. In some embodiments, a MORC6-like protein refers to a recombinant MORC6 protein or fragment thereof that is fused to a CAS9 protein or fragment thereof. In some embodiments, a MORC6-like protein refers to a recombinant MORC6 protein or fragment thereof that is fused to an MS2 coat protein or fragment thereof. In some embodiments, a MORC6-like protein refers to a recombinant MORC6 protein or fragment thereof that is fused to an scFV antibody or fragment thereof. MORC6-like proteins may be used in reducing the expression of one or more target nucleic acids, such as genes, in plants.

[0328] MORC6 proteins are known in the art and are described herein. In some embodiments, a MORC6 protein fragment contains at least 20 consecutive amino acids, at least 30 consecutive amino acids, at least 40 consecutive amino acids, at least 50 consecutive amino acids, at least 60 consecutive amino acids, at least 70 consecutive amino acids, at least 80 consecutive amino acids, at least 90 consecutive amino acids, at least 100 consecutive amino acids, at least 120 consecutive amino acids, at least 140 consecutive amino acids, at least 160 consecutive amino acids, at least 180 consecutive amino acids, at least 200 consecutive amino acids, at least 220 consecutive amino acids, at least 240 consecutive amino acids, or 241 or more consecutive amino acids of a full-length MORC6 protein. In some embodiments, MORC6 protein fragments may include sequences with one or more amino acids removed from the consecutive amino acid sequence of a full-length MORC6 protein. In some embodiments, MORC6 protein fragments may include sequences with one or more amino acids replaced/substituted with an amino acid different from the endogenous amino acid present at a given amino acid position in a consecutive amino acid sequence of a full-length MORC6 protein. In some embodiments, MORC6 protein fragments may include sequences with one or more amino acids added to an otherwise consecutive amino acid sequence of a full-length MORC6 protein.

[0329] Suitable MORC6 proteins may be identified and isolated from monocot and dicot plants. Examples of such plants may include, for example, Arabidopsis spp., Ricinus communis, Glycine max, Zea Mays, Medicago truncatula, Physcomitrella patens, Sorghum bicolor, and Oryza sativa. Examples of suitable MORC6 proteins may include, for example, those listed in Table 29, homologs thereof, and orthologs thereof.

TABLE 29
MORC6 Proteins

| | | SEQ ID |
|---|---|---|
| Organism | Gene Name | NO: |
| Arabidopsis thaliana | MORC6 | 542 |
| Solanum lycopersicum | XP_004230214.1 | 543 |
| Solanum tuberosum | XP_006344837.1 | 544 |
| Phaseolus vulgaris | ESW10038.1 | 545 |
| Vitis vinifera | XP_002278685.1 | 546 |
| Theobroma cacao | EOY20772.1 | 547 |
| Triticum urarte | EMS64080.1 | 548 |
| Glycine max | XP_003523086.1 | 549 |
| Oriza sativa Japonica group | EEE54777.1 | 550 |
| Oriza sativa Indica group | EEC70857.1 | 551 |
| Zea mays | AFW84846.1 | 552 |
| Sorghum bicolor | XP_002455787.1 | 553 |

[0330] In some embodiments, a MORC6 protein or fragment thereof of the present disclosure has an amino acid sequence with at least about 20%, at least about 25%, at least about 30%, at least about 40%, at least about 50%, at least about 55%, at least about 60%, at least about 65%, at least about 70%, at least about 75%, at least about 80%, at least about 85%, at least about 90%, at least about 91%, at least about 92%, at least about 93%, at least about 94%, at least about 95%, at least about 96%, at least about 97%, at least about 98%, at least about 99%, or at least about 100% amino acid identity to the amino acid sequence of the A. thaliana MORC6 protein (SEQ ID NO: 542).

[0331] A MORC6-like protein may include the amino acid sequence or a fragment thereof of any MORC6 homolog or ortholog, such as, for example, any one of those listed in Table 29. One of skill would readily recognize that additional MORC6 homologs and/or orthologs may exist and may be used herein.

[0332] SUVR2 Proteins

[0333] Certain aspects of the present disclosure relate to SUVR2-like proteins. In some embodiments, a SUVR2-like protein refers to a recombinant SUVR2 protein or fragment thereof and that contains a heterologous DNA-binding domain. In some embodiments, a SUVR2-like protein refers to a recombinant SUVR2 protein or fragment thereof that is fused to a CAS9 protein or fragment thereof. In some embodiments, a SUVR2-like protein refers to a recombinant SUVR2 protein or fragment thereof that is fused to an MS2 coat protein or fragment thereof. In some embodiments, a SUVR2-like protein refers to a recombinant SUVR2 protein or fragment thereof that is fused to an scFV antibody or fragment thereof. SUVR2-like proteins may be used in reducing the expression of one or more target nucleic acids, such as genes, in plants.

[0334] SUVR2 proteins are known in the art and are described herein. In some embodiments, a SUVR2 protein fragment contains at least 20 consecutive amino acids, at least 30 consecutive amino acids, at least 40 consecutive amino acids, at least 50 consecutive amino acids, at least 60 consecutive amino acids, at least 70 consecutive amino acids, at least 80 consecutive amino acids, at least 90 consecutive amino acids, at least 100 consecutive amino acids, at least 120 consecutive amino acids, at least 140 consecutive amino acids, at least 160 consecutive amino acids, at least 180 consecutive amino acids, at least 200 consecutive amino acids, at least 220 consecutive amino acids, at least 240 consecutive amino acids, or 241 or more consecutive amino acids of a full-length SUVR2 protein. In some embodiments, SUVR2 protein fragments may include sequences with one or more amino acids removed from the consecutive amino acid sequence of a full-length SUVR2 protein. In some embodiments, SUVR2 protein fragments may include sequences with one or more amino acids replaced/substituted with an amino acid different from the endogenous amino acid present at a given amino acid position in a consecutive amino acid sequence of a full-length SUVR2 protein. In some embodiments, SUVR2 protein fragments may include sequences with one or more amino acids added to an otherwise consecutive amino acid sequence of a full-length SUVR2 protein.

[0335] Suitable SUVR2 proteins may be identified and isolated from monocot and dicot plants. Examples of such plants may include, for example, Arabidopsis spp., Ricinus communis, Glycine max, Zea Mays, Medicago truncatula, Physcomitrella patens, Sorghum bicolor, and Oryza sativa. Examples of suitable SUVR2 proteins may include, for example, those listed in Table 30, homologs thereof, and orthologs thereof.

TABLE 30
SUVR2 Proteins

| | | SEQ ID |
|---|---|---|
| Organism | Gene Name | NO: |
| Arabidopsis thaliana | SUVR2 | 554 |
| Solanum lycopersicum | XP_004247936.1 | 555 |
| Solanum tuberosum | XP_006358446.1 | 556 |
| Phaseolus vulgaris | ESW16847.1 | 557 |
| Vitis vinifera | XP_002270320.2 | 558 |
| Theobroma cacao | EOX94338.1 | 559 |
| Triticum urarte | EMS67506.1 | 560 |
| Glycine max | XP_003541369.1 | 561 |
| Oriza sativa Japonica group | NP_001047458.1 | 562 |
| Oriza sativa Indica group | EEC78330.1 | 563 |
| Zea mays | DAA48520.1 | 564 |
| Sorghum bicolor | XP_002445655.1 | 565 |

[0336] In some embodiments, a SUVR2 protein or fragment thereof of the present disclosure has an amino acid sequence with at least about 20%, at least about 25%, at least about 30%, at least about 40%, at least about 50%, at least about 55%, at least about 60%, at least about 65%, at least about 70%, at least about 75%, at least about 80%, at least about 85%, at least about 90%, at least about 91%, at least about 92%, at least about 93%, at least about 94%, at least about 95%, at least about 96%, at least about 97%, at least about 98%, at least about 99%, or at least about 100% amino acid identity to the amino acid sequence of the A. thaliana SUVR2 protein (SEQ ID NO: 554).

[0337] A SUVR2-like protein may include the amino acid sequence or a fragment thereof of any SUVR2 homolog or ortholog, such as, for example, any one of those listed in Table 30. One of skill would readily recognize that additional SUVR2 homologs and/or orthologs may exist and may be used herein.

[0338] DRD1 Proteins

[0339] Certain aspects of the present disclosure relate to DRD1-like proteins. In some embodiments, a DRD1-like protein refers to a recombinant DRD1 protein or fragment thereof and that contains a heterologous DNA-binding domain. In some embodiments, a DRD1-like protein refers to a recombinant DRD1 protein or fragment thereof that is fused to a CAS9 protein or fragment thereof. In some embodiments, a DRD1-like protein refers to a recombinant DRD1 protein or fragment thereof that is fused to an MS2 coat protein or fragment thereof. In some embodiments, a DRD1-like protein refers to a recombinant DRD1 protein or fragment thereof that is fused to an scFV antibody or fragment thereof. DRD1-like proteins may be used in reducing the expression of one or more target nucleic acids, such as genes, in plants.

[0340] DRD1 proteins are known in the art and are described herein. In some embodiments, a DRD1 protein fragment contains at least 20 consecutive amino acids, at least 30 consecutive amino acids, at least 40 consecutive amino acids, at least 50 consecutive amino acids, at least 60 consecutive amino acids, at least 70 consecutive amino acids, at least 80 consecutive amino acids, at least 90 consecutive amino acids, at least 100 consecutive amino acids, at least 120 consecutive amino acids, at least 140 consecutive amino acids, at least 160 consecutive amino acids, at least 180 consecutive amino acids, at least 200 consecutive amino acids, at least 220 consecutive amino acids, at least 240 consecutive amino acids, or 241 or more consecutive amino acids of a full-length DRD1 protein. In some embodiments, DRD1 protein fragments may include sequences with one or more amino acids removed from the consecutive amino acid sequence of a full-length DRD1 protein. In some embodiments, DRD1 protein fragments may include sequences with one or more amino acids replaced/substituted with an amino acid different from the endogenous amino acid present at a given amino acid position in a consecutive amino acid sequence of a full-length DRD1 protein. In some embodiments, DRD1 protein fragments may include sequences with one or more amino acids added to an otherwise consecutive amino acid sequence of a full-length DRD1 protein.

[0341] Suitable DRD1 proteins may be identified and isolated from monocot and dicot plants. Examples of such plants may include, for example, Arabidopsis spp., Ricinus communis, Glycine max, Zea Mays, Physcomitrella patens, Sorghum bicolor, and Oryza sativa. Examples of suitable DRD1 proteins may include, for example, those listed in Table 31, homologs thereof, and orthologs thereof.

TABLE 31
DRD1 Proteins

| Organism | Gene Name | SEQ ID NO: |
|---|---|---|
| Arabidopsis thaliana | NP_179232.1 | 566 |
| Ricinus communis | XP_002530324.1 | 567 |
| Glycine max | XP_003540522.1 | 568 |
| Zea mays | AFW57413.1 | 569 |
| Physcomitrella patens | XP_001752976.1 | 570 |
| Sorghum bicolor | XP_002445019.1 | 571 |
| Oryza sativa | BAC84084.1 | 572 |
| Brachypodium distachyon | XP_003571619.1 | 573 |
| Populus trichocarpa | XP_002313774.2 | 574 |
| Vitis vinifera | XP_002273814.1 | 575 |
| Cucumis sativus | XP_004170971.1 | 576 |
| Arabidopsis lyrata | XP_002884170.1 | 577 |

[0342] In some embodiments, a DRD1 protein or fragment thereof of the present disclosure has an amino acid sequence with at least about 20%, at least about 25%, at least about 30%, at least about 40%, at least about 50%, at least about 55%, at least about 60%, at least about 65%, at least about 70%, at least about 75%, at least about 80%, at least about 85%, at least about 90%, at least about 91%, at least about 92%, at least about 93%, at least about 94%, at least about 95%, at least about 96%, at least about 97%, at least about 98%, at least about 99%, or at least about 100% amino acid identity to the amino acid sequence of the A. thaliana DRD1 protein (SEQ ID NO: 566).

[0343] A DRD1-like protein may include the amino acid sequence or a fragment thereof of any DRD1 homolog or ortholog, such as, for example, any one of those listed in Table 31. One of skill would readily recognize that additional DRD1 homologs and/or orthologs may exist and may be used herein.

[0344] RDM1 Proteins

[0345] Certain aspects of the present disclosure relate to RDM1-like proteins. In some embodiments, a RDM1-like protein refers to a recombinant RDM1 protein or fragment thereof and that contains a heterologous DNA-binding domain. In some embodiments, a RDM1-like protein refers to a recombinant RDM1 protein or fragment thereof that is fused to a CAS9 protein or fragment thereof. In some embodiments, a RDM1-like protein refers to a recombinant RDM1 protein or fragment thereof that is fused to an MS2 coat protein or fragment thereof. In some embodiments, a RDM1-like protein refers to a recombinant RDM1 protein or fragment thereof that is fused to an scFV antibody or fragment thereof. RDM1-like proteins may be used in reducing the expression of one or more target nucleic acids, such as genes, in plants.

[0346] RDM1 proteins are known in the art and are described herein. In some embodiments, a RDM1 protein fragment contains at least 20 consecutive amino acids, at least 30 consecutive amino acids, at least 40 consecutive amino acids, at least 50 consecutive amino acids, at least 60 consecutive amino acids, at least 70 consecutive amino acids, at least 80 consecutive amino acids, at least 90 consecutive amino acids, at least 100 consecutive amino acids, at least 120 consecutive amino acids, at least 140 consecutive amino acids, at least 160 consecutive amino acids, at least 180 consecutive amino acids, at least 200 consecutive amino acids, at least 220 consecutive amino acids, at least 240 consecutive amino acids, or 241 or more consecutive amino acids of a full-length RDM1 protein. In some embodiments, RDM1 protein fragments may include sequences with one or more amino acids removed from the consecutive amino acid sequence of a full-length RDM1 protein. In some embodiments, RDM1 protein fragments may include sequences with one or more amino acids replaced/substituted with an amino acid different from the endogenous amino acid present at a given amino acid position in a consecutive amino acid sequence of a full-length RDM1 protein. In some embodiments, RDM1 protein fragments may include sequences with one or more amino acids added to an otherwise consecutive amino acid sequence of a full-length RDM1 protein.

[0347] Suitable RDM1 proteins may be identified and isolated from monocot and dicot plants. Examples of such plants may include, for example, Arabidopsis spp., Ricinus communis, Glycine max, Zea Mays, and Oryza sativa. Examples of suitable RDM1 proteins may include, for example, those listed in Table 32, homologs thereof, and orthologs thereof.

TABLE 32
RDM1 Proteins

| Organism | Gene Name | SEQ ID NO: |
|---|---|---|
| Arabidopsis thaliana | NP_188907.2 | 578 |
| Ricinus communis | XP_002517093.1 | 579 |
| Glycine max | NP_001237231.1 | 580 |
| Zea mays | NP_001170520.1 | 581 |
| Medicago truncatula | XP_003610752.1 | 582 |
| Oryza sativa | BAD38576.1 | 583 |
| Populus trichocarpa | XP_002311634.1 | 584 |
| Vitis vinifera | XP_002279112.2 | 585 |
| Cucumis sativus | XP_004134127.1 | 586 |
| Arabidopsis lyrata | XP_002883375.1 | 587 |

[0348] In some embodiments, a RDM1 protein or fragment thereof of the present disclosure has an amino acid sequence with at least about 20%, at least about 25%, at least about 30%, at least about 40%, at least about 50%, at least about 55%, at least about 60%, at least about 65%, at least about 70%, at least about 75%, at least about 80%, at least about 85%, at least about 90%, at least about 91%, at least about 92%, at least about 93%, at least about 94%, at least about 95%, at least about 96%, at least about 97%, at least about 98%, at least about 99%, or at least about 100% amino acid identity to the amino acid sequence of the A. thaliana RDM1 protein (SEQ ID NO: 578).

[0349] A RDM1-like protein may include the amino acid sequence or a fragment thereof of any RDM1 homolog or ortholog, such as, for example, any one of those listed in Table 32. One of skill would readily recognize that additional RDM1 homologs and/or orthologs may exist and may be used herein.

[0350] DRM3 Proteins

[0351] Certain aspects of the present disclosure relate to DRM3-like proteins. In some embodiments, a DRM3-like protein refers to a recombinant DRM3 protein or fragment thereof and that contains a heterologous DNA-binding domain. In some embodiments, a DRM3-like protein refers to a recombinant DRM3 protein or fragment thereof that is fused to a CAS9 protein or fragment thereof. In some embodiments, a DRM3-like protein refers to a recombinant DRM3 protein or fragment thereof that is fused to an MS2 coat protein or fragment thereof. In some embodiments, a DRM3-like protein refers to a recombinant DRM3 protein or fragment thereof that is fused to an scFV antibody or fragment thereof. DRM3-like proteins may be used in reducing the expression of one or more target nucleic acids, such as genes, in plants.

[0352] DRM3 proteins are known in the art and are described herein. In some embodiments, a DRM3 protein fragment contains at least 20 consecutive amino acids, at least 30 consecutive amino acids, at least 40 consecutive amino acids, at least 50 consecutive amino acids, at least 60 consecutive amino acids, at least 70 consecutive amino acids, at least 80 consecutive amino acids, at least 90 consecutive amino acids, at least 100 consecutive amino acids, at least 120 consecutive amino acids, at least 140 consecutive amino acids, at least 160 consecutive amino acids, at least 180 consecutive amino acids, at least 200 consecutive amino acids, at least 220 consecutive amino acids, at least 240 consecutive amino acids, or 241 or more consecutive amino acids of a full-length DRM3 protein. In some embodiments, DRM3 protein fragments may include sequences with one or more amino acids removed from the consecutive amino acid sequence of a full-length DRM3 protein. In some embodiments, DRM3 protein fragments may include sequences with one or more amino acids replaced/substituted with an amino acid different from the endogenous amino acid present at a given amino acid position in a consecutive amino acid sequence of a full-length DRM3 protein. In some embodiments, DRM3 protein fragments may include sequences with one or more amino acids added to an otherwise consecutive amino acid sequence of a full-length DRM3 protein.

[0353] Suitable DRM3 proteins may be identified and isolated from monocot and dicot plants. Examples of such plants may include, for example, Arabidopsis spp., Ricinus communis, Glycine max, Zea Mays, Physcomitrella patens, Sorghum bicolor, and Oryza sativa. Examples of suitable DRM3 proteins may include, for example, those listed in Table 33, homologs thereof, and orthologs thereof.

TABLE 33
DRM3 Proteins

| Organism | Gene Name | SEQ ID NO: |
|---|---|---|
| Arabidopsis thaliana | NP_566573.1 | 588 |
| Ricinus communis | XP_002519294.1 | 589 |
| Glycine max | XP_006583974.1 | 590 |
| Zea mays | NP_001105094.1 | 591 |
| Medicago truncatula | XP_003609841.1 | 592 |
| Sorghum bicolor | XP_002468285.1 | 593 |
| Oryza sativa | AAT85176.1 | 594 |
| Brachypodium distachyon | XP_003569077.1 | 595 |
| Populus trichocarpa | XP_002316067.2 | 596 |
| Vitis vinifera | XP_002264226.1 | 597 |
| Cucumis sativus | XP_004138523.1 | 598 |
| Arabidopsis lyrata | XP_002885200.1 | 599 |

[0354] In some embodiments, a DRM3 protein or fragment thereof of the present disclosure has an amino acid sequence with at least about 20%, at least about 25%, at least about 30%, at least about 40%, at least about 50%, at least about 55%, at least about 60%, at least about 65%, at least about 70%, at least about 75%, at least about 80%, at least about 85%, at least about 90%, at least about 91%, at least about 92%, at least about 93%, at least about 94%, at least about 95%, at least about 96%, at least about 97%, at least about 98%, at least about 99%, or at least about 100% amino acid identity to the amino acid sequence of the A. thaliana DRM3 protein (SEQ ID NO: 588).

[0355] A DRM3-like protein may include the amino acid sequence or a fragment thereof of any DRM3 homolog or ortholog, such as, for example, any one of those listed in Table 33. One of skill would readily recognize that additional DRM3 homologs and/or orthologs may exist and may be used herein.

[0356] DRM2 Proteins

[0357] Certain aspects of the present disclosure relate to DRM2-like proteins. In some embodiments, a DRM2-like protein refers to a recombinant DRM2 protein or fragment thereof and that contains a heterologous DNA-binding domain. In some embodiments, a DRM2-like protein refers to a recombinant DRM2 protein or fragment thereof that is fused to a CAS9 protein or fragment thereof. In some embodiments, a DRM2-like protein refers to a recombinant DRM2 protein or fragment thereof that is fused to an MS2 coat protein or fragment thereof. In some embodiments, a DRM2-like protein refers to a recombinant DRM2 protein or fragment thereof that is fused to an scFV antibody or fragment thereof. DRM2-like proteins may be used in reducing the expression of one or more target nucleic acids, such as genes, in plants.

[0358] DRM2 proteins are known in the art and are described herein. In some embodiments, a DRM2 protein fragment contains at least 20 consecutive amino acids, at least 30 consecutive amino acids, at least 40 consecutive amino acids, at least 50 consecutive amino acids, at least 60 consecutive amino acids, at least 70 consecutive amino acids, at least 80 consecutive amino acids, at least 90 consecutive amino acids, at least 100 consecutive amino acids, at least 120 consecutive amino acids, at least 140 consecutive amino acids, at least 160 consecutive amino acids, at least 180 consecutive amino acids, at least 200 consecutive amino acids, at least 220 consecutive amino acids, at least 240 consecutive amino acids, or 241 or more consecutive amino acids of a full-length DRM2 protein. In some embodiments, DRM2 protein fragments may include sequences with one or more amino acids removed from the consecutive amino acid sequence of a full-length DRM2 protein. In some embodiments, DRM2 protein fragments may include sequences with one or more amino acids replaced/substituted with an amino acid different from the endogenous amino acid present at a given amino acid position in a consecutive amino acid sequence of a full-length DRM2 protein. In some embodiments, DRM2 protein fragments may include sequences with one or more amino acids added to an otherwise consecutive amino acid sequence of a full-length DRM2 protein.

[0359] Suitable DRM2 proteins may be identified and isolated from monocot and dicot plants. Examples of such plants may include, for example, Arabidopsis spp., Nicotiana tabacum, Ricinus communis, Glycine max, Zea Mays, Physcomitrella patens, Sorghum bicolor, and Oryza sativa. Examples of suitable DRM2 proteins may include, for example, those listed in Table 34, homologs thereof, and orthologs thereof.

TABLE 34
DRM2 Proteins

| Organism | Gene Name | SEQ ID NO: |
|---|---|---|
| Arabidopsis thaliana | NP_196966.2 | 600 |
| Ricinus communis | XP_002521449.1 | 601 |
| Glycine max | XP_003524549.1 | 602 |
| Zea mays | NP_001104977.1 | 603 |
| Medicago truncatula | XP_003618189.1 | 604 |
| Sorghum bicolor | XP_002468660.1 | 605 |
| Oryza saliva | ABF93591.1 | 606 |
| Brachypodium distachyon | XP_003575456.1 | 607 |
| Populus trichocarpa | XP_002300046.2 | 608 |
| Vitis vinifera | XP_002273972.2 | 609 |
| Cucumis sativus | XP_004141100.1 | 610 |
| Arabidopsis lyrata | XP_002873681.1 | 611 |
| Nicotiana tabacum | NP_001313186.1 | 678 |

[0360] In some embodiments, a DRM2 protein or fragment thereof of the present disclosure has an amino acid sequence with at least about 20%, at least about 25%, at least about 30%, at least about 40%, at least about 50%, at least about 55%, at least about 60%, at least about 65%, at least about 70%, at least about 75%, at least about 80%, at least about 85%, at least about 90%, at least about 91%, at least about 92%, at least about 93%, at least about 94%, at least about 95%, at least about 96%, at least about 97%, at least about 98%, at least about 99%, or at least about 100% amino acid identity to the amino acid sequence of the A. thaliana DRM2 protein (SEQ ID NO: 600), or to SEQ ID NO: 678.

[0361] A DRM2-like protein may include the amino acid sequence or a fragment thereof of any DRM2 homolog or ortholog, such as, for example, any one of those listed in Table 34. One of skill would readily recognize that additional DRM2 homologs and/or orthologs may exist and may be used herein.

[0362] In some embodiments, the fragment of DRM2 is a fragment that contains the catalytic (methyltransferase) domain of DRM2. In some embodiments, the fragment is a DRM2-MTase fragment from tobacco (e.g. SEQ ID NO: 679), or a homolog or ortholog thereof. In some embodiments, a DRM2-MTase fragment of the present disclosure has an amino acid sequence with at least about 20%, at least about 25%, at least about 30%, at least about 40%, at least about 50%, at least about 55%, at least about 60%, at least about 65%, at least about 70%, at least about 75%, at least about 80%, at least about 85%, at least about 90%, at least about 91%, at least about 92%, at least about 93%, at least about 94%, at least about 95%, at least about 96%, at least about 97%, at least about 98%, at least about 99%, or at least about 100% amino acid identity to the amino acid sequence of SEQ ID NO: 679.

[0363] FRG Proteins

[0364] Certain aspects of the present disclosure relate to FRG-like proteins. In some embodiments, a FRG-like protein refers to a recombinant FRG protein or fragment thereof and that contains a heterologous DNA-binding domain. In some embodiments, a FRG-like protein refers to a recombinant FRG protein or fragment thereof that is fused to a CAS9 protein or fragment thereof. In some embodiments, a FRG-like protein refers to a recombinant FRG protein or fragment thereof that is fused to an MS2 coat protein or fragment thereof. In some embodiments, a FRG-like protein refers to a recombinant FRG protein or fragment thereof that is fused to an scFV antibody or fragment thereof. FRG-like proteins may be used in reducing the expression of one or more target nucleic acids, such as genes, in plants.

[0365] FRG proteins are known in the art and are described herein. In some embodiments, a FRG protein fragment contains at least 20 consecutive amino acids, at least 30 consecutive amino acids, at least 40 consecutive amino acids, at least 50 consecutive amino acids, at least 60 consecutive amino acids, at least 70 consecutive amino acids, at least 80 consecutive amino acids, at least 90 consecutive amino acids, at least 100 consecutive amino acids, at least 120 consecutive amino acids, at least 140 consecutive amino acids, at least 160 consecutive amino acids, at least 180 consecutive amino acids, at least 200 consecutive amino acids, at least 220 consecutive amino acids, at least 240 consecutive amino acids, or 241 or more consecutive amino acids of a full-length FRG protein. In some embodiments, FRG protein fragments may include sequences with one or more amino acids removed from the consecutive amino acid sequence of a full-length FRG protein. In some embodiments, FRG protein fragments may include sequences with one or more amino acids replaced/substituted with an amino acid different from the endogenous amino acid present at a given amino acid position in a consecutive amino acid sequence of a full-length FRG protein. In some embodiments, FRG protein fragments may include sequences with one or more amino acids added to an otherwise consecutive amino acid sequence of a full-length FRG protein.

[0366] Suitable FRG proteins may be identified and isolated from monocot and dicot plants. Examples of such plants may include, for example, Arabidopsis spp., Ricinus communis, Glycine max, Zea Mays, Physcomitrella patens, Sorghum bicolor, and Oryza sativa. Examples of suitable FRG proteins may include, for example, those listed in Table 35, homologs thereof, and orthologs thereof.

TABLE 35
FRG Proteins

| Organism | Gene Name | SEQ ID NO: |
|---|---|---|
| Arabidopsis thaliana | NP_188635.1 | 612 |
| Ricinus communis | XP_002513133.1 | 613 |
| Glycine max | XP_003555190.1 | 614 |
| Zea mays | AFW61101.1 | 615 |
| Medicago truncatula | XP_003593498.1 | 616 |
| Physcomitrella patens | XP_001770987.1 | 617 |
| Sorghum bicolor | XP_002458594.1 | 618 |
| Oryza sativa | NP_001061138.1 | 619 |
| Brachypodium distachyon | XP_003560909.1 | 620 |
| Populus trichocarpa | XP_002305010.2 | 621 |
| Vitis vinifera | XP_002267403 | 622 |
| Cucumis sativus | XP_004134959 | 623 |
| Arabidopsis lyrata | XP_002883222.1 | 624 |

[0367] In some embodiments, a FRG protein or fragment thereof of the present disclosure has an amino acid sequence with at least about 20%, at least about 25%, at least about 30%, at least about 40%, at least about 50%, at least about 55%, at least about 60%, at least about 65%, at least about 70%, at least about 75%, at least about 80%, at least about 85%, at least about 90%, at least about 91%, at least about 92%, at least about 93%, at least about 94%, at least about 95%, at least about 96%, at least about 97%, at least about 98%, at least about 99%, or at least about 100% amino acid identity to the amino acid sequence of the A. thaliana FRG protein (SEQ ID NO: 612).

[0368] A FRG-like protein may include the amino acid sequence or a fragment thereof of any FRG homolog or ortholog, such as, for example, any one of those listed in Table 35. One of skill would readily recognize that additional FRG homologs and/or orthologs may exist and may be used herein.

[0369] ATRX Proteins

[0370] Certain aspects of the present disclosure relate to ATRX-like proteins. In some embodiments, an ATRX-like protein refers to a recombinant ATRX protein or fragment thereof and that contains a heterologous DNA-binding domain. In some embodiments, an ATRX-like protein refers to a recombinant ATRX protein or fragment thereof that is fused to a CAS9 protein or fragment thereof. In some embodiments, an ATRX-like protein refers to a recombinant ATRX protein or fragment thereof that is fused to an MS2 coat protein or fragment thereof. In some embodiments, an ATRX-like protein refers to a recombinant ATRX protein or fragment thereof that is fused to an scFV antibody or fragment thereof. ATRX-like proteins may be used in reducing the expression of one or more target nucleic acids, such as genes, in plants.

[0371] ATRX proteins are known in the art and are described herein. In some embodiments, an ATRX protein fragment contains at least 20 consecutive amino acids, at least 30 consecutive amino acids, at least 40 consecutive amino acids, at least 50 consecutive amino acids, at least 60 consecutive amino acids, at least 70 consecutive amino acids, at least 80 consecutive amino acids, at least 90 consecutive amino acids, at least 100 consecutive amino acids, at least 120 consecutive amino acids, at least 140 consecutive amino acids, at least 160 consecutive amino acids, at least 180 consecutive amino acids, at least 200 consecutive amino acids, at least 220 consecutive amino acids, at least 240 consecutive amino acids, or 241 or more consecutive amino acids of a full-length ATRX protein. In some embodiments, ATRX protein fragments may include sequences with one or more amino acids removed from the consecutive amino acid sequence of a full-length ATRX protein. In some embodiments, ATRX protein fragments may include sequences with one or more amino acids replaced/substituted with an amino acid different from the endogenous amino acid present at a given amino acid position in a consecutive amino acid sequence of a full-length ATRX protein. In some embodiments, ATRX protein fragments may include sequences with one or more amino acids added to an otherwise consecutive amino acid sequence of a full-length ATRX protein.

[0372] Suitable ATRX proteins may be identified and isolated from monocot and dicot plants. Examples of such plants may include, for example, Arabidopsis spp., Ricinus communis, Glycine max, Zea Mays, Sorghum bicolor, and Oryza sativa. Examples of suitable ATRX proteins may include, for example, those listed in Table 36, homologs thereof, and orthologs thereof.

TABLE 36
ATRX Proteins

| Organism | Gene Name | SEQ ID NO: |
|---|---|---|
| Arabidopsis thaliana | NP_001184937 | 681 |
| Arabidopsis lyrata | XP_002889705 | 682 |
| Cucumis sativus | XP_011649017.1 | 683 |
| Vitis vinifera | XP_010660172.1 | 684 |
| Medicago truncatula | XP_003590986.2 | 685 |
| Ricinus communis | EEF40405.1 | 686 |
| Glycine max | XP_014618708.1 | 687 |
| Zea mays | NP_001295442.1 | 688 |
| Sorghum bicolor | KXG38419.1 | 689 |
| Oryza sativa | XP_015614509.1 | 690 |
| Brachypodium distachyon | XP_003571839.1 | 691 |
| Populus trichocarpa | XP_002319663.2 | 692 |
| Brassica napus | CDX95047.1 | 693 |

[0373] In some embodiments, a ATRX protein or fragment thereof of the present disclosure has an amino acid sequence with at least about 20%, at least about 25%, at least about 30%, at least about 40%, at least about 50%, at least about 55%, at least about 60%, at least about 65%, at least about 70%, at least about 75%, at least about 80%, at least about 85%, at least about 90%, at least about 91%, at least about 92%, at least about 93%, at least about 94%, at least about 95%, at least about 96%, at least about 97%, at least about 98%, at least about 99%, or at least about 100% amino acid identity to the amino acid sequence of the A. thaliana ATRX protein (SEQ ID NO: 681).

[0374] An ATRX-like protein may include the amino acid sequence or a fragment thereof of any ATRX homolog or ortholog, such as, for example, any one of those listed in Table 36. One of skill would readily recognize that additional ATRX homologs and/or orthologs may exist and may be used herein.

[0375] MOM1 Proteins

[0376] Certain aspects of the present disclosure relate to MOM1-like proteins. In some embodiments, a MOM1-like protein refers to a recombinant MOM1 protein or fragment thereof and that contains a heterologous DNA-binding domain. In some embodiments, a MOM1-like protein refers to a recombinant MOM1 protein or fragment thereof that is fused to a CAS9 protein or fragment thereof. In some embodiments, a MOM1-like protein refers to a recombinant MOM1 protein or fragment thereof that is fused to an MS2 coat protein or fragment thereof. In some embodiments, a MOM1-like protein refers to a recombinant MOM1 protein or fragment thereof that is fused to an scFV antibody or fragment thereof. MOM1-like proteins may be used in reducing the expression of one or more target nucleic acids, such as genes, in plants.

[0377] MOM1 proteins are known in the art and are described herein. In some embodiments, an MOM1 protein fragment contains at least 20 consecutive amino acids, at least 30 consecutive amino acids, at least 40 consecutive amino acids, at least 50 consecutive amino acids, at least 60 consecutive amino acids, at least 70 consecutive amino acids, at least 80 consecutive amino acids, at least 90 consecutive amino acids, at least 100 consecutive amino acids, at least 120 consecutive amino acids, at least 140 consecutive amino acids, at least 160 consecutive amino acids, at least 180 consecutive amino acids, at least 200 consecutive amino acids, at least 220 consecutive amino acids, at least 240 consecutive amino acids, or 241 or more consecutive amino acids of a full-length MOM1 protein. In some embodiments, MOM1 protein fragments may include sequences with one or more amino acids removed from the consecutive amino acid sequence of a full-length MOM1 protein. In some embodiments, MOM1 protein fragments may include sequences with one or more amino acids replaced/substituted with an amino acid different from the endogenous amino acid present at a given amino acid position in a consecutive amino acid sequence of a full-length MOM1 protein. In some embodiments, MOM1 protein fragments may include sequences with one or more amino acids added to an otherwise consecutive amino acid sequence of a full-length MOM1 protein.

[0378] Suitable MOM1 proteins may be identified and isolated from monocot and dicot plants. Examples of such plants may include, for example, Arabidopsis spp., Ricinus communis, Glycine max, Zea Mays, Sorghum bicolor, and Oryza sativa. Examples of suitable MOM1 proteins may include, for example, those listed in Table 37, homologs thereof, and orthologs thereof.

TABLE 37
MOM1 Proteins

| Organism | Gene Name | SEQ ID NO: |
|---|---|---|
| Arabidopsis thaliana | NP_563806.1 | 694 |
| Arabidopsis lyrata | XP_002892431.1 | 695 |
| Cucumis sativus | XP_011653950.1 | 696 |
| Vitis vinifera | XP_010651197.1 | 697 |
| Medicago truncatula | XP_013465325.1 | 698 |
| Ricinus communis | EEF32941.1 | 699 |
| Glycine max | KRH26470.1 | 700 |
| Zea mays | XP_008659422.1 | 701 |
| Sorghum bicolor | KXG19083 | 702 |
| Oryza sativa | BAS95710.1 | 703 |
| Brachypodium distachyon | KQJ86790 | 704 |
| Populus trichocarpa | XP_002318937.1 | 705 |
| Brassica napus | XP_013711471 | 706 |

[0379] In some embodiments, a MOM1 protein or fragment thereof of the present disclosure has an amino acid sequence with at least about 20%, at least about 25%, at least about 30%, at least about 40%, at least about 50%, at least about 55%, at least about 60%, at least about 65%, at least about 70%, at least about 75%, at least about 80%, at least about 85%, at least about 90%, at least about 91%, at least about 92%, at least about 93%, at least about 94%, at least about 95%, at least about 96%, at least about 97%, at least about 98%, at least about 99%, or at least about 100% amino acid identity to the amino acid sequence of the A. thaliana MOM1 protein (SEQ ID NO: 694).

[0380] A MOM1-like protein may include the amino acid sequence or a fragment thereof of any MOM1 homolog or ortholog, such as, for example, any one of those listed in Table 37. One of skill would readily recognize that additional MOM1 homologs and/or orthologs may exist and may be used herein.

[0381] MORC1 Proteins

[0382] Certain aspects of the present disclosure relate to MORC1-like proteins. In some embodiments, a MORC1-like protein refers to a recombinant MORC1 protein or fragment thereof and that contains a heterologous DNA-binding domain. In some embodiments, a MORC1-like protein refers to a recombinant MORC1 protein or fragment thereof that is fused to a CAS9 protein or fragment thereof. In some embodiments, a MORC1-like protein refers to a recombinant MORC1 protein or fragment thereof that is fused to an MS2 coat protein or fragment thereof. In some embodiments, a MORC1-like protein refers to a recombinant MORC1 protein or fragment thereof that is fused to an scFV antibody or fragment thereof. MORC1-like proteins may be used in reducing the expression of one or more target nucleic acids, such as genes, in plants.

[0383] MORC1 proteins are known in the art and are described herein. In plants, MORC1 was first identified to be involved in plant disease resistance signaling (Kang H G et al, 208a, 2008b, 2010). More recently, MORC1 has been shown to be involved in gene silencing and chromatin compaction, although the mechanism of action is not well understood (Moissard, G et al, 2012, 2014, Liu Z W et al, 2014).

[0384] In some embodiments, an MORC1 protein fragment contains at least 20 consecutive amino acids, at least 30 consecutive amino acids, at least 40 consecutive amino acids, at least 50 consecutive amino acids, at least 60 consecutive amino acids, at least 70 consecutive amino acids, at least 80 consecutive amino acids, at least 90 consecutive amino acids, at least 100 consecutive amino acids, at least 120 consecutive amino acids, at least 140 consecutive amino acids, at least 160 consecutive amino acids, at least 180 consecutive amino acids, at least 200 consecutive amino acids, at least 220 consecutive amino acids, at least 240 consecutive amino acids, or 241 or more consecutive amino acids of a full-length MORC1 protein. In some embodiments, MORC1 protein fragments may include sequences with one or more amino acids removed from the consecutive amino acid sequence of a full-length MORC1 protein. In some embodiments, MORC1 protein fragments may include sequences with one or more amino acids replaced/substituted with an amino acid different from the endogenous amino acid present at a given amino acid position in a consecutive amino acid sequence of a full-length MORC1 protein. In some embodiments, MORC1 protein fragments may include sequences with one or more amino acids added to an otherwise consecutive amino acid sequence of a full-length MORC1 protein.

[0385] Suitable MORC1 proteins may be identified and isolated from monocot and dicot plants. Examples of such plants may include, for example, Arabidopsis spp., Ricinus communis, Glycine max, Zea Mays, Sorghum bicolor, and Oryza sativa. Examples of suitable MORC1 proteins may include, for example, those listed in Table 38, homologs thereof, and orthologs thereof.

TABLE 38
MORC1 Proteins

| Organism | Gene Name | SEQ ID NO: |
|---|---|---|
| Arabidopsis thaliana | NP_568000.1 | 707 |
| Arabidopsis lyrata | XP_002867022.1 | 708 |
| Cucumis sativus | XP_011653148.1 | 709 |
| Vitis vinifera | XP_002267687.2 | 710 |
| Medicago truncatula | XP_013446369.1 | 711 |
| Ricinus communis | XP_002533659.2 | 712 |
| Glycine max | KRH69835.1 | 713 |
| Zea mays | XP_008675511.1 | 714 |
| Sorghum bicolor | KXG24418.1 | 715 |
| Oryza sativa | AAK70637.1 | 716 |
| Brachypodium distachyon | XP_003573822.1 | 717 |
| Populus trichocarpa | XP_006383149.1 | 718 |
| Brassica napus | XP_013745728.1 | 719 |

[0386] In some embodiments, a MORC1 protein or fragment thereof of the present disclosure has an amino acid sequence with at least about 20%, at least about 25%, at least about 30%, at least about 40%, at least about 50%, at least about 55%, at least about 60%, at least about 65%, at least about 70%, at least about 75%, at least about 80%, at least about 85%, at least about 90%, at least about 91%, at least about 92%, at least about 93%, at least about 94%, at least about 95%, at least about 96%, at least about 97%, at least about 98%, at least about 99%, or at least about 100% amino acid identity to the amino acid sequence of the A. thaliana MORC1 protein (SEQ ID NO: 707).

[0387] A MORC1-like protein may include the amino acid sequence or a fragment thereof of any MORC1 homolog or ortholog, such as, for example, any one of those listed in Table 38. One of skill would readily recognize that additional MORC1 homologs and/or orthologs may exist and may be used herein.

[0388] SssI Proteins

[0389] Certain aspects of the present disclosure relate to SssI-like proteins. In some embodiments, a SssI-like protein refers to a recombinant SssI protein or fragment thereof and that contains a heterologous DNA-binding domain. In some embodiments, a SssI-like protein refers to a recombinant SssI protein or fragment thereof that is fused to a CAS9 protein or fragment thereof. In some embodiments, a SssI-like protein refers to a recombinant SssI protein or fragment thereof that is fused to an MS2 coat protein or fragment thereof. In some embodiments, a SssI-like protein refers to a recombinant SssI protein or fragment thereof that is fused to an scFV antibody or fragment thereof. SssI-like proteins may be used in reducing the expression of one or more target nucleic acids, such as genes, in plants.

[0390] SssI proteins are known in the art and are described herein. SssI is a DNA methyltransferase from the bacteria Spiroplasma sp. with homologs in other bacterial species.

[0391] In some embodiments, an SssI protein fragment contains at least 20 consecutive amino acids, at least 30 consecutive amino acids, at least 40 consecutive amino acids, at least 50 consecutive amino acids, at least 60 consecutive amino acids, at least 70 consecutive amino acids, at least 80 consecutive amino acids, at least 90 consecutive amino acids, at least 100 consecutive amino acids, at least 120 consecutive amino acids, at least 140 consecutive amino acids, at least 160 consecutive amino acids, at least 180 consecutive amino acids, at least 200 consecutive amino acids, at least 220 consecutive amino acids, at least 240 consecutive amino acids, or 241 or more consecutive amino acids of a full-length SssI protein. In some embodiments, SssI protein fragments may include sequences with one or more amino acids removed from the consecutive amino acid sequence of a full-length SssI protein. In some embodiments, SssI protein fragments may include sequences with one or more amino acids replaced/substituted with an amino acid different from the endogenous amino acid present at a given amino acid position in a consecutive amino acid sequence of a full-length SssI protein. In some embodiments, SssI protein fragments may include sequences with one or more amino acids added to an otherwise consecutive amino acid sequence of a full-length SssI protein.

[0392] Suitable SssI proteins may be identified and isolated from suitable bacterial species. Examples of suitable SssI proteins may include, for example, those listed in Table 39, homologs thereof, and orthologs thereof.

TABLE 39
SssI Proteins

| Organism | Gene Name | SEQ ID NO: |
|---|---|---|
| Spiroplasma monobiae | P15840.3 | 680 |
| Mycoplasma penetrans | WP_011077318.1 | 748 |
| Acholeplasma sp. CAG: 878 | CCY28146.1 | 749 |
| Mycoplasma hyosynoviae | KDE43677.1 | 750 |
| Mesoplasma seiffertii | WP_051418436.1 | 751 |
| Clostridium diolis | WP_039773024.1 | 752 |
| Streptococcus sanguinis | WP_011837382.1 | 753 |

[0393] In some embodiments, a SssI protein or fragment thereof of the present disclosure has an amino acid sequence with at least about 20%, at least about 25%, at least about 30%, at least about 40%, at least about 50%, at least about 55%, at least about 60%, at least about 65%, at least about 70%, at least about 75%, at least about 80%, at least about 85%, at least about 90%, at least about 91%, at least about 92%, at least about 93%, at least about 94%, at least about 95%, at least about 96%, at least about 97%, at least about 98%, at least about 99%, or at least about 100% amino acid identity to the amino acid sequence of the SssI protein (SEQ ID NO: 680).

[0394] A SssI-like protein may include the amino acid sequence or a fragment thereof of any SssI homolog or ortholog, such as, for example, any one of those listed in Table 39. One of skill would readily recognize that additional SssI homologs and/or orthologs may exist and may be used herein.

[0395] In some aspects, use of an SssI-like protein according to the methods of the present disclosure may result in genome-wide methylation of nucleic acids as compared to a corresponding control.

[0396] Other bacterial CpG methyltransferase enzymes may also be used in the methods and compositions of the present disclosure. Exemplary bacterial CpG methyltransferases include M.MpeI proteins, such as M.MpeI from Mycoplasma penetrans HF-2 (SEQ ID NO: 754).

[0397] Various other bacterial DNA cytosine methyltransferases may also be used in the methods and compositions of the present disclosure. Exemplary bacterial DNA cytosine methyltransferases include HhaI proteins, such as HhaI from Haemophilus parahaemolyticus (SEQ ID NO: 755). HhaI is a GCGC specific methylase.

[0398] DNMT3A Proteins

[0399] Certain aspects of the present disclosure relate to DNMT3A-like proteins. In some embodiments, a DNMT3A-like protein refers to a recombinant DNMT3A protein or fragment thereof and that contains a heterologous DNA-binding domain. In some embodiments, a DNMT3A-like protein refers to a recombinant DNMT3A protein or fragment thereof that is fused to a CAS9 protein or fragment thereof. In some embodiments, a DNMT3A-like protein refers to a recombinant DNMT3A protein or fragment thereof that is fused to an MS2 coat protein or fragment thereof. In some embodiments, a DNMT3A-like protein refers to a recombinant DNMT3A protein or fragment thereof that is fused to an scFV antibody or fragment thereof. DNMT3A-like proteins may be used in reducing the expression of one or more target nucleic acids, such as genes, in plants.

[0400] DNMT3A proteins are known in the art and are described herein. In some embodiments, an DNMT3A protein fragment contains at least 20 consecutive amino acids, at least 30 consecutive amino acids, at least 40 consecutive amino acids, at least 50 consecutive amino acids, at least 60 consecutive amino acids, at least 70 consecutive amino acids, at least 80 consecutive amino acids, at least 90 consecutive amino acids, at least 100 consecutive amino acids, at least 120 consecutive amino acids, at least 140 consecutive amino acids, at least 160 consecutive amino acids, at least 180 consecutive amino acids, at least 200 consecutive amino acids, at least 220 consecutive amino acids, at least 240 consecutive amino acids, or 241 or more consecutive amino acids of a full-length DNMT13A protein. In some embodiments, DNMT3A protein fragments may include sequences with one or more amino acids removed from the consecutive amino acid sequence of a full-length DNMT3A protein. In some embodiments, DNMT3A protein fragments may include sequences with one or more amino acids replaced/substituted with an amino acid different from the endogenous amino acid present at a given amino acid position in a consecutive amino acid sequence of a full-length DNMT3A protein. In some embodiments, DNMT3A protein fragments may include sequences with one or more amino acids added to an otherwise consecutive amino acid sequence of a full-length DNMT3A protein.

[0401] Suitable DNMT3A proteins may be identified and isolated from various species Examples of suitable DNMT3A proteins may include, for example, those listed in Table 40, homologs thereof, and orthologs thereof.

TABLE 40
DNMT3A Proteins

| Organism | Gene Name | SEQ ID NO: |
|---|---|---|
| Mus musculus | NP_031898.1 | 861 |
| Homo sapiens | NP_072046.2 | 808 |
| Pan Paniscus | XP_008950657 | 809 |
| Rattus norvegicus | NP_001003958.1 | 810 |
| Rhinolophus sinicus | XP_019568274.1 | 811 |
| Equus caballus | XP_005600228.1 | 812 |
| Ovis aries | XP012021398.1 | 813 |
| Bos Taurus | AAP75901.1 | 814 |
| Orcinus orca | XP_012387866.1 | 815 |
| Ictidomys tridecemlineatus | XP_005322636.1 | 816 |
| Monodelphis domestica | XP_016286174.1 | 817 |

[0402] In some embodiments, a DNMT3A protein or fragment thereof of the present disclosure has an amino acid sequence with at least about 20%, at least about 25%, at least about 30%, at least about 40%, at least about 50%, at least about 55%, at least about 60%, at least about 65%, at least about 70%, at least about 75%, at least about 80%, at least about 85%, at least about 90%, at least about 91%, at least about 92%, at least about 93%, at least about 94%, at least about 95%, at least about 96%, at least about 97%, at least about 98%, at least about 99%, or at least about 100% amino acid identity to the amino acid sequence of the Mus musculus DNMT3A protein (SEQ ID NO: 861).

[0403] A DNMT3A-like protein may include the amino acid sequence or a fragment thereof of any DNMT3A homolog or ortholog, such as, for example, any one of those listed in Table 40. One of skill would readily recognize that additional DNMT3A homologs and/or orthologs may exist and may be used herein.

[0404] In some embodiments, the catalytic domain of a DNMT3A protein (e.g. SEQ ID NO: 818) may be used in a polypeptide of the present disclosure. In some embodiments, a DNMT3A polypeptide of the present disclosure has an amino acid sequence with at least about 20%, at least about 25%, at least about 30%, at least about 40%, at least about 50%, at least about 55%, at least about 60%, at least about 65%, at least about 70%, at least about 75%, at least about 80%, at least about 85%, at least about 90%, at least about 91%, at least about 92%, at least about 93%, at least about 94%, at least about 95%, at least about 96%, at least about 97%, at least about 98%, at least about 99%, or at least about 100% amino acid identity to the amino acid sequence of SEQ ID NO: 818.

[0405] DNMT3L Proteins

[0406] Certain aspects of the present disclosure relate to DNMT3L-like proteins. In some embodiments, a DNMT3L-like protein refers to a recombinant DNMT3L protein or fragment thereof and that contains a heterologous DNA-binding domain. In some embodiments, a DNMT3L-like protein refers to a recombinant DNMT3L protein or fragment thereof that is fused to a CAS9 protein or fragment thereof. In some embodiments, a DNMT3L-like protein refers to a recombinant DNMT3L protein or fragment thereof that is fused to an MS2 coat protein or fragment thereof. In some embodiments, a DNMT3L-like protein refers to a recombinant DNMT3L protein or fragment thereof that is fused to an scFV antibody or fragment thereof. DNMT3L-like proteins may be used in reducing the expression of one or more target nucleic acids, such as genes, in plants.

[0407] DNMT3L proteins are known in the art and are described herein. In some embodiments, an DNMT3L protein fragment contains at least 20 consecutive amino acids, at least 30 consecutive amino acids, at least 40 consecutive amino acids, at least 50 consecutive amino acids, at least 60 consecutive amino acids, at least 70 consecutive amino acids, at least 80 consecutive amino acids, at least 90 consecutive amino acids, at least 100 consecutive amino acids, at least 120 consecutive amino acids, at least 140 consecutive amino acids, at least 160 consecutive amino acids, at least 180 consecutive amino acids, at least 200 consecutive amino acids, at least 220 consecutive amino acids, at least 240 consecutive amino acids, or 241 or more consecutive amino acids of a full-length DNMT3L protein. In some embodiments, DNMT3L protein fragments may include sequences with one or more amino acids removed from the consecutive amino acid sequence of a full-length DNMT3L protein. In some embodiments, DNMT3L protein fragments may include sequences with one or more amino acids replaced/substituted with an amino acid different from the endogenous amino acid present at a given amino acid position in a consecutive amino acid sequence of a full-length DNMT3L protein. In some embodiments, DNMT3L protein fragments may include sequences with one or more amino acids added to an otherwise consecutive amino acid sequence of a full-length DNMT3L protein.

[0408] Suitable DNMT3L proteins may be identified and isolated from various species Examples of suitable DNMT3L proteins may include, for example, those listed in Table 41, homologs thereof, and orthologs thereof.

TABLE 41
DN1VIT3L Proteins

| Organism | Gene Name | SEQ ID NO: |
|---|---|---|
| Mus musculus | NP_062321.1 | 819 |
| Pan paniscus | XP_003823892.1 | 820 |
| Rattus norvegicus | NP_00103964.1 | 821 |
| Rhinolophus sinicus | XP_019601251.1 | 822 |
| Equus caballus | XP_014591962.1 | 823 |
| Ovis aries | XP_014947250.1 | 824 |
| Bos Taurus | XP_010822784.1 | 825 |
| Orcinus orca | XP_004264713.1 | 826 |
| Ictidomys tridecemlineatus | XP_005323631.1 | 827 |
| Monodelphis domestica | XP_007493361.1 | 828 |
| Homo sapiens | NP_037501.2 | 862 |

[0409] In some embodiments, a DNMT3L protein or fragment thereof of the present disclosure has an amino acid sequence with at least about 20%, at least about 25%, at least about 30%, at least about 40%, at least about 50%, at least about 55%, at least about 60%, at least about 65%, at least about 70%, at least about 75%, at least about 80%, at least about 85%, at least about 90%, at least about 91%, at least about 92%, at least about 93%, at least about 94%, at least about 95%, at least about 96%, at least about 97%, at least about 98%, at least about 99%, or at least about 100% amino acid identity to the amino acid sequence of the Mus musculus DNMT3L protein (SEQ ID NO: 819).

[0410] A DNMT3L-like protein may include the amino acid sequence or a fragment thereof of any DNMT3L homolog or ortholog, such as, for example, any one of those listed in Table 41. One of skill would readily recognize that additional DNMT3L homologs and/or orthologs may exist and may be used herein.

[0411] In some embodiments, the C-terminal region of a DNMT3L protein (e.g. SEQ ID NO: 829) may be used in a polypeptide of the present disclosure. In some embodiments, a DNMT3L polypeptide of the present disclosure has an amino acid sequence with at least about 20%, at least about 25%, at least about 30%, at least about 40%, at least about 50%, at least about 55%, at least about 60%, at least about 65%, at least about 70%, at least about 75%, at least about 80%, at least about 85%, at least about 90%, at least about 91%, at least about 92%, at least about 93%, at least about 94%, at least about 95%, at least about 96%, at least about 97%, at least about 98%, at least about 99%, or at least about 100% amino acid identity to the amino acid sequence of SEQ ID NO: 829.

[0412] In some embodiments, fusion proteins containing DNMT3A amino acid sequences fused with DNMT3L amino acid sequences may be used. In some embodiments, a DNMT3A-DNMT3L fusion protein of the present disclosure has an amino acid sequence with at least about 20%, at least about 25%, at least about 30%, at least about 40%, at least about 50%, at least about 55%, at least about 60%, at least about 65%, at least about 70%, at least about 75%, at least about 80%, at least about 85%, at least about 90%, at least about 91%, at least about 92%, at least about 93%, at least about 94%, at least about 95%, at least about 96%, at least about 97%, at least about 98%, at least about 99%, or at least about 100% amino acid identity to the amino acid sequence of SEQ ID NO: 859.

[0413] MBD9 Proteins

[0414] Certain aspects of the present disclosure relate to MBD9-like proteins. In some embodiments, a MBD9-like protein refers to a recombinant MBD9 protein or fragment thereof and that contains a heterologous DNA-binding domain. In some embodiments, a MBD9-like protein refers to a recombinant MBD9 protein or fragment thereof that is fused to a CAS9 protein or fragment thereof. In some embodiments, a MBD9-like protein refers to a recombinant MBD9 protein or fragment thereof that is fused to an MS2 coat protein or fragment thereof. In some embodiments, a MBD9-like protein refers to a recombinant MBD9 protein or fragment thereof that is fused to an scFV antibody or fragment thereof. MBD9-like proteins may be used in reducing the expression of one or more target nucleic acids, such as genes, in plants.

[0415] MBD9 proteins are known in the art and are described herein. FIG. 41 provides an alignment of all MBD proteins in Arabidopsis plus three from humans, and illustrates high conservation of key residues in the methyl-binding domain.

[0416] In some embodiments, an MBD9 protein fragment contains at least 20 consecutive amino acids, at least 30 consecutive amino acids, at least 40 consecutive amino acids, at least 50 consecutive amino acids, at least 60 consecutive amino acids, at least 70 consecutive amino acids, at least 80 consecutive amino acids, at least 90 consecutive amino acids, at least 100 consecutive amino acids, at least 120 consecutive amino acids, at least 140 consecutive amino acids, at least 160 consecutive amino acids, at least 180 consecutive amino acids, at least 200 consecutive amino acids, at least 220 consecutive amino acids, at least 240 consecutive amino acids, or 241 or more consecutive amino acids of a full-length MBD9 protein. In some embodiments, MBD9 protein fragments may include sequences with one or more amino acids removed from the consecutive amino acid sequence of a full-length MBD9 protein. In some embodiments, MBD9 protein fragments may include sequences with one or more amino acids replaced/substituted with an amino acid different from the endogenous amino acid present at a given amino acid position in a consecutive amino acid sequence of a full-length MBD9 protein. In some embodiments, MBD9 protein fragments may include sequences with one or more amino acids added to an otherwise consecutive amino acid sequence of a full-length MBD9 protein.

[0417] Suitable MBD9 proteins may be identified and isolated from monocot and dicot plants. Examples of such plants may include, for example, Arabidopsis spp., Ricinus communis, Glycine max, Zea Mays, Sorghum bicolor, and Oryza sativa. Examples of suitable MBD9 proteins may include, for example, those listed in Table 42, homologs thereof, and orthologs thereof.

TABLE 42
MBD9 Proteins

| Organism | Gene Name | SEQ ID NO: |
|---|---|---|
| Arabidopsis thaliana | NP_186795.1 | 830 |
| Arabidopsis lyrata | XP_002884279.1 | 831 |
| Cucumis sativus | KGN59651.1 | 832 |
| Vitis vinifera | XP_010660927.1 | 833 |
| Medicago truncatula | XP_013450825.1 | 834 |
| Ricinus communis | XP_015573615.1 | 835 |
| Glycine max | XP_006594288.1 | 836 |
| Zea mays | AQK60154.1 | 837 |
| Sorghum bicolor | KXG29684.1 | 838 |
| Oryza sativa | EEE56485.1 | 839 |
| Brachypodium distachyon | XP_003571114.3 | 840 |
| Populus trichocarpa | XP_002324010.2 | 841 |
| Brassica napus | CDY28674.1 | 842 |

[0418] In some embodiments, a MBD9 protein or fragment thereof of the present disclosure has an amino acid sequence with at least about 20%, at least about 25%, at least about 30%, at least about 40%, at least about 50%, at least about 55%, at least about 60%, at least about 65%, at least about 70%, at least about 75%, at least about 80%, at least about 85%, at least about 90%, at least about 91%, at least about 92%, at least about 93%, at least about 94%, at least about 95%, at least about 96%, at least about 97%, at least about 98%, at least about 99%, or at least about 100% amino acid identity to the amino acid sequence of the A. thaliana MBD9 protein (SEQ ID NO: 830).

[0419] A MBD9-like protein may include the amino acid sequence or a fragment thereof of any MBD9 homolog or ortholog, such as, for example, any one of those listed in Table 42. One of skill would readily recognize that additional MBD9 homologs and/or orthologs may exist and may be used herein.

[0420] Other Epigenetic Regulators

[0421] Various other epigenetic regulators may be used according to the methods of the present disclosure to target and silence a specific nucleic acid. Other exemplary proteins include DCL3 and SPT5L. DCL3 encodes a ribonuclease III family protein. An exemplary DCL3 protein includes, using A. thaliana as an exemplary host plant, SEQ ID NO: 391. SPT5L is a member of the nuclear SPT5 (Suppressor of Ty insertion 5) RNA polymerase (RNAP) elongation factor family. An exemplary SPT5L protein includes, using A. thaliana as an exemplary host plant, SEQ ID NO: 392. These proteins, as well as homologs and orthologs thereof, may also be used in the methods and compositions of the present disclosure to target and silence a specific nucleic acid as described herein for any other epigenetic regulator-like protein (e.g. AGO4-like proteins).

[0422] Other exemplary epigenetic regulators that may be used according to the methods of the present disclosure to target and silence a specific nucleic acid include, for example, DMS4, HEN1, SWI3B, DRB3 and other HYL1 homologs, DRH1 (At3g01540), DRH2 (At5g14610), UBP26, LDL1, LDL2, RDM16, SR45, STA1, KYP, MET1, VIM1 and other VIM homologs, STRS1, STRS2, ATRX, CHR25, CHR8, MOM1, MOM2 (At2g28240), STP4-1 (At5g08565), SPT4-2 (At5g63760), NRPE1, CMT3, CLSY1, IDN2, RDR6, DDM1, HDA8 and homologs and orthologs thereof.

[0423] Further, the bacterial CG specific methylase protein, SssI (SEQ ID NO: 680), may also be used in the methods and compositions of the present disclosure, as well as homologs and orthologs thereof. The mammalian CpG methyltransferase, DNMT3A, as well as fragments and homologs thereof, may also be used herein. For example, the catalytic domain of a DNMT3A polypeptide may be used herein (e.g. SEQ ID NO: 807). DNMT3L, as well as fragments and homologs thereof, may also be used herein. In some embodiments, polypeptide fusions of DNMT3A and DNMT3L amino acid sequences may also be used. Exemplary fusions of DNMT3A-DNMT3L may contain the catalytic domain of a DNMT3A protein, and the C-terminal region of a DNMT3L protein. An exemplary such fusion is presented in SEQ ID NO: 859.

### Recombinant Nucleic Acids Encoding Recombinant Proteins

[0424] Certain aspects of the present disclosure relate to recombinant nucleic acids encoding recombinant proteins of the present disclosure. In some embodiments, recombinant proteins of the present disclosure are recombinantly fused to a heterologous DNA-binding domain. In some embodiments, recombinant proteins of the present disclosure are recombinantly fused to a CAS9 protein. In some embodiments, recombinant proteins of the present disclosure are recombinantly fused to an MS2 coat protein. In some embodiments, recombinant proteins of the present disclosure are recombinantly fused to an scFV antibody. The recombinant proteins may be e.g. SHH1-like proteins, SHH2-like proteins, AGO4-like proteins, HDA6-like proteins, NRPD1-like proteins, NRPE1-like proteins, JMJ14-like proteins, RDR2-like proteins, NRPD2A/NRPE2-like proteins, NRPB3/NRPD3/NRPE3A-like proteins, NRPE3B-like proteins, NRPB11/NRPD11/NRPE11-like proteins, NRPB10/NRPD10/NRPE10-like proteins, NRPB12/NRPD12/NRPE12-like proteins, NRPB6A/NRPD6A/NRPE6A-like proteins, NRPB6B/NRPD6B/NRPE6B-like proteins, NRPB8A/NRPE8A-like proteins, NRPB8B/NRPD8B/NRPE8B-like proteins, NRPE5-like proteins, NRPD4/NRPE4-like proteins, NRPE7-like proteins, NRPD7-like proteins, NRPB5/NRPD5-like proteins, NRPB9A/NRPD9A/NRPE9A-like proteins, NRPB9B/NRPD9B/NRPE9B-like proteins, ATRX-like proteins, MOM1-like proteins, MORC1-like proteins, SssI-like proteins, DRM2-MTase-like proteins, DNMT3A-like proteins, DNMT3L-like proteins, MBD9-like proteins, SUVH2-like proteins, SUVH9-like proteins, DMS3-like proteins, MORC6-like proteins, SUVR2-like proteins, DRD1-like proteins, RDM1-like proteins, DRM3-like proteins, DRM2-like proteins, and/or FRG-like proteins.

[0425] As used herein, the terms “polynucleotide,” “nucleic acid,” and variations thereof shall be generic to polydeoxyribonucleotides (containing 2-deoxy-D-ribose), to polyribonucleotides (containing D-ribose), to any other type of polynucleotide that is an N-glycoside of a purine or pyrimidine base, and to other polymers containing non-nucleotide backbones, provided that the polymers contain nucleobases in a configuration that allows for base pairing and base stacking, as found in DNA and RNA. Thus, these terms include known types of nucleic acid sequence modifications, for example, substitution of one or more of the naturally occurring nucleotides with an analog, and inter-nucleotide modifications. As used herein, the symbols for nucleotides and polynucleotides are those recommended by the IUPAC-IUB Commission of Biochemical Nomenclature.

[0426] In one aspect, the present disclosure provides a recombinant nucleic acid encoding an SHH1-like protein. In some embodiments, the recombinant nucleic acid encodes an SHH1 polypeptide or fragment thereof that has an amino acid sequence that is at least 50%, at least 55%, at least 60%, at least 65%, at least 70%, at least 75%, at least 80%, at least 85%, at least 90%, at least 91%, at least 92%, at least 93%, at least 94%, at least 95%, at least 96%, at least 97%, at least 98%, at least 99%, or 100% identical to SEQ ID NO: 1.

[0427] In one aspect, the present disclosure provides a recombinant nucleic acid encoding an SHH2-like protein. In some embodiments, the recombinant nucleic acid encodes an SHH2 polypeptide or fragment thereof that has an amino acid sequence that is at least 50%, at least 55%, at least 60%, at least 65%, at least 70%, at least 75%, at least 80%, at least 85%, at least 90%, at least 91%, at least 92%, at least 93%, at least 94%, at least 95%, at least 96%, at least 97%, at least 98%, at least 99%, or 100% identical to SEQ ID NO: 14.

[0428] In one aspect, the present disclosure provides a recombinant nucleic acid encoding an AGO4-like protein. In some embodiments, the recombinant nucleic acid encodes an AGO4 polypeptide or fragment thereof that has an amino acid sequence that is at least 50%, at least 55%, at least 60%, at least 65%, at least 70%, at least 75%, at least 80%, at least 85%, at least 90%, at least 91%, at least 92%, at least 93%, at least 94%, at least 95%, at least 96%, at least 97%, at least 98%, at least 99%, or 100% identical to SEQ ID NO: 15.

[0429] In one aspect, the present disclosure provides a recombinant nucleic acid encoding an HDA6-like protein. In some embodiments, the recombinant nucleic acid encodes an HDA6 polypeptide or fragment thereof that has an amino acid sequence that is at least 50%, at least 55%, at least 60%, at least 65%, at least 70%, at least 75%, at least 80%, at least 85%, at least 90%, at least 91%, at least 92%, at least 93%, at least 94%, at least 95%, at least 96%, at least 97%, at least 98%, at least 99%, or 100% identical to SEQ ID NO: 28.

[0430] In one aspect, the present disclosure provides a recombinant nucleic acid encoding an NRPD1-like protein. In some embodiments, the recombinant nucleic acid encodes an NRPD1 polypeptide or fragment thereof that has an amino acid sequence that is at least 50%, at least 55%, at least 60%, at least 65%, at least 70%, at least 75%, at least 80%, at least 85%, at least 90%, at least 91%, at least 92%, at least 93%, at least 94%, at least 95%, at least 96%, at least 97%, at least 98%, at least 99%, or 100% identical to SEQ ID NO: 41.

[0431] In one aspect, the present disclosure provides a recombinant nucleic acid encoding an NRPE1-like protein. In some embodiments, the recombinant nucleic acid encodes an NRPE1 polypeptide or fragment thereof that has an amino acid sequence that is at least 50%, at least 55%, at least 60%, at least 65%, at least 70%, at least 75%, at least 80%, at least 85%, at least 90%, at least 91%, at least 92%, at least 93%, at least 94%, at least 95%, at least 96%, at least 97%, at least 98%, at least 99%, or 100% identical to SEQ ID NO: 54.

[0432] In one aspect, the present disclosure provides a recombinant nucleic acid encoding a JMJ14-like protein. In some embodiments, the recombinant nucleic acid encodes a JMJ14 polypeptide or fragment thereof that has an amino acid sequence that is at least 50%, at least 55%, at least 60%, at least 65%, at least 70%, at least 75%, at least 80%, at least 85%, at least 90%, at least 91%, at least 92%, at least 93%, at least 94%, at least 95%, at least 96%, at least 97%, at least 98%, at least 99%, or 100% identical to SEQ ID NO: 80.

[0433] In one aspect, the present disclosure provides a recombinant nucleic acid encoding an RDR2-like protein. In some embodiments, the recombinant nucleic acid encodes an RDR2 polypeptide or fragment thereof that has an amino acid sequence that is at least 50%, at least 55%, at least 60%, at least 65%, at least 70%, at least 75%, at least 80%, at least 85%, at least 90%, at least 91%, at least 92%, at least 93%, at least 94%, at least 95%, at least 96%, at least 97%, at least 98%, at least 99%, or 100% identical to SEQ ID NO: 132.

[0434] In one aspect, the present disclosure provides a recombinant nucleic acid encoding an NRPD2A/NRPE2-like protein. In some embodiments, the recombinant nucleic acid encodes an NRPD2A/NRPE2 polypeptide or fragment thereof that has an amino acid sequence that is at least 50%, at least 55%, at least 60%, at least 65%, at least 70%, at least 75%, at least 80%, at least 85%, at least 90%, at least 91%, at least 92%, at least 93%, at least 94%, at least 95%, at least 96%, at least 97%, at least 98%, at least 99%, or 100% identical to SEQ ID NO: 145.

[0435] In one aspect, the present disclosure provides a recombinant nucleic acid encoding an NRPB3/NRPD3/NRPE3A-like protein. In some embodiments, the recombinant nucleic acid encodes an NRPB3/NRPD3/NRPE3A polypeptide or fragment thereof that has an amino acid sequence that is at least 50%, at least 55%, at least 60%, at least 65%, at least 70%, at least 75%, at least 80%, at least 85%, at least 90%, at least 91%, at least 92%, at least 93%, at least 94%, at least 95%, at least 96%, at least 97%, at least 98%, at least 99%, or 100% identical to SEQ ID NO: 158.

[0436] In one aspect, the present disclosure provides a recombinant nucleic acid encoding an NRPE3B-like protein. In some embodiments, the recombinant nucleic acid encodes an NRPE3B polypeptide or fragment thereof that has an amino acid sequence that is at least 50%, at least 55%, at least 60%, at least 65%, at least 70%, at least 75%, at least 80%, at least 85%, at least 90%, at least 91%, at least 92%, at least 93%, at least 94%, at least 95%, at least 96%, at least 97%, at least 98%, at least 99%, or 100% identical to SEQ ID NO: 171.

[0437] In one aspect, the present disclosure provides a recombinant nucleic acid encoding an NRPB11/NRPD11/NRPE11-like protein. In some embodiments, the recombinant nucleic acid encodes an NRPB11/NRPD11/NRPE11 polypeptide or fragment thereof that has an amino acid sequence that is at least 50%, at least 55%, at least 60%, at least 65%, at least 70%, at least 75%, at least 80%, at least 85%, at least 90%, at least 91%, at least 92%, at least 93%, at least 94%, at least 95%, at least 96%, at least 97%, at least 98%, at least 99%, or 100% identical to SEQ ID NO: 184.

[0438] In one aspect, the present disclosure provides a recombinant nucleic acid encoding an NRPB10/NRPD10/NRPE10-like protein. In some embodiments, the recombinant nucleic acid encodes an NRPB10/NRPD10/NRPE10 polypeptide or fragment thereof that has an amino acid sequence that is at least 50%, at least 55%, at least 60%, at least 65%, at least 70%, at least 75%, at least 80%, at least 85%, at least 90%, at least 91%, at least 92%, at least 93%, at least 94%, at least 95%, at least 96%, at least 97%, at least 98%, at least 99%, or 100% identical to SEQ ID NO: 197.

[0439] In one aspect, the present disclosure provides a recombinant nucleic acid encoding an NRPB12/NRPD12/NRPE12-like protein. In some embodiments, the recombinant nucleic acid encodes an NRPB12/NRPD12/NRPE12 polypeptide or fragment thereof that has an amino acid sequence that is at least 50%, at least 55%, at least 60%, at least 65%, at least 70%, at least 75%, at least 80%, at least 85%, at least 90%, at least 91%, at least 92%, at least 93%, at least 94%, at least 95%, at least 96%, at least 97%, at least 98%, at least 99%, or 100% identical to SEQ ID NO: 209.

[0440] In one aspect, the present disclosure provides a recombinant nucleic acid encoding an NRPB6A/NRPD6A/NRPE6A-like protein. In some embodiments, the recombinant nucleic acid encodes an NRPB6A/NRPD6A/NRPE6A polypeptide or fragment thereof that has an amino acid sequence that is at least 50%, at least 55%, at least 60%, at least 65%, at least 70%, at least 75%, at least 80%, at least 85%, at least 90%, at least 91%, at least 92%, at least 93%, at least 94%, at least 95%, at least 96%, at least 97%, at least 98%, at least 99%, or 100% identical to SEQ ID NO: 221.

[0441] In one aspect, the present disclosure provides a recombinant nucleic acid encoding an NRPB6B/NRPD6B/NRPE6B-like protein. In some embodiments, the recombinant nucleic acid encodes an NRPB6B/NRPD6B/NRPE6B polypeptide or fragment thereof that has an amino acid sequence that is at least 50%, at least 55%, at least 60%, at least 65%, at least 70%, at least 75%, at least 80%, at least 85%, at least 90%, at least 91%, at least 92%, at least 93%, at least 94%, at least 95%, at least 96%, at least 97%, at least 98%, at least 99%, or 100% identical to SEQ ID NO: 234.

[0442] In one aspect, the present disclosure provides a recombinant nucleic acid encoding an NRPB8A/NRPE8A-like protein. In some embodiments, the recombinant nucleic acid encodes an NRPB8A/NRPE8A polypeptide or fragment thereof that has an amino acid sequence that is at least 50%, at least 55%, at least 60%, at least 65%, at least 70%, at least 75%, at least 80%, at least 85%, at least 90%, at least 91%, at least 92%, at least 93%, at least 94%, at least 95%, at least 96%, at least 97%, at least 98%, at least 99%, or 100% identical to SEQ ID NO: 247.

[0443] In one aspect, the present disclosure provides a recombinant nucleic acid encoding an NRPB8B/NRPD8B/NRPE8B-like protein. In some embodiments, the recombinant nucleic acid encodes an NRPB8B/NRPD8B/NRPE8B polypeptide or fragment thereof that has an amino acid sequence that is at least 50%, at least 55%, at least 60%, at least 65%, at least 70%, at least 75%, at least 80%, at least 85%, at least 90%, at least 91%, at least 92%, at least 93%, at least 94%, at least 95%, at least 96%, at least 97%, at least 98%, at least 99%, or 100% identical to SEQ ID NO: 260.

[0444] In one aspect, the present disclosure provides a recombinant nucleic acid encoding an NRPE5-like protein. In some embodiments, the recombinant nucleic acid encodes an NRPE5 polypeptide or fragment thereof that has an amino acid sequence that is at least 50%, at least 55%, at least 60%, at least 65%, at least 70%, at least 75%, at least 80%, at least 85%, at least 90%, at least 91%, at least 92%, at least 93%, at least 94%, at least 95%, at least 96%, at least 97%, at least 98%, at least 99%, or 100% identical to SEQ ID NO: 273.

[0445] In one aspect, the present disclosure provides a recombinant nucleic acid encoding an NRPD4/NRPE4-like protein. In some embodiments, the recombinant nucleic acid encodes an NRPD4/NRPE4 polypeptide or fragment thereof that has an amino acid sequence that is at least 50%, at least 55%, at least 60%, at least 65%, at least 70%, at least 75%, at least 80%, at least 85%, at least 90%, at least 91%, at least 92%, at least 93%, at least 94%, at least 95%, at least 96%, at least 97%, at least 98%, at least 99%, or 100% identical to SEQ ID NO: 286.

[0446] In one aspect, the present disclosure provides a recombinant nucleic acid encoding an NRPE7-like protein. In some embodiments, the recombinant nucleic acid encodes an NRPE7 polypeptide or fragment thereof that has an amino acid sequence that is at least 50%, at least 55%, at least 60%, at least 65%, at least 70%, at least 75%, at least 80%, at least 85%, at least 90%, at least 91%, at least 92%, at least 93%, at least 94%, at least 95%, at least 96%, at least 97%, at least 98%, at least 99%, or 100% identical to SEQ ID NO: 299.

[0447] In one aspect, the present disclosure provides a recombinant nucleic acid encoding an NRPD7-like protein. In some embodiments, the recombinant nucleic acid encodes an NRPD7 polypeptide or fragment thereof that has an amino acid sequence that is at least 50%, at least 55%, at least 60%, at least 65%, at least 70%, at least 75%, at least 80%, at least 85%, at least 90%, at least 91%, at least 92%, at least 93%, at least 94%, at least 95%, at least 96%, at least 97%, at least 98%, at least 99%, or 100% identical to SEQ ID NO: 312.

[0448] In one aspect, the present disclosure provides a recombinant nucleic acid encoding an NRPB5/NRPD5-like protein. In some embodiments, the recombinant nucleic acid encodes an NRPB5/NRPD5 polypeptide or fragment thereof that has an amino acid sequence that is at least 50%, at least 55%, at least 60%, at least 65%, at least 70%, at least 75%, at least 80%, at least 85%, at least 90%, at least 91%, at least 92%, at least 93%, at least 94%, at least 95%, at least 96%, at least 97%, at least 98%, at least 99%, or 100% identical to SEQ ID NO: 325.

[0449] In one aspect, the present disclosure provides a recombinant nucleic acid encoding an NRPB9A/NRPD9A/NRPE9A-like protein. In some embodiments, the recombinant nucleic acid encodes an NRPB9A/NRPD9A/NRPE9A polypeptide or fragment thereof that has an amino acid sequence that is at least 50%, at least 55%, at least 60%, at least 65%, at least 70%, at least 75%, at least 80%, at least 85%, at least 90%, at least 91%, at least 92%, at least 93%, at least 94%, at least 95%, at least 96%, at least 97%, at least 98%, at least 99%, or 100% identical to SEQ ID NO: 337.

[0450] In one aspect, the present disclosure provides a recombinant nucleic acid encoding an NRPB9B/NRPD9B/NRPE9B-like protein. In some embodiments, the recombinant nucleic acid encodes an NRPB9B/NRPD9B/NRPE9B polypeptide or fragment thereof that has an amino acid sequence that is at least 50%, at least 55%, at least 60%, at least 65%, at least 70%, at least 75%, at least 80%, at least 85%, at least 90%, at least 91%, at least 92%, at least 93%, at least 94%, at least 95%, at least 96%, at least 97%, at least 98%, at least 99%, or 100% identical to SEQ ID NO: 350.

[0451] In one aspect, the present disclosure provides a recombinant nucleic acid encoding an SUVH2-like protein. In some embodiments, the recombinant nucleic acid encodes an SUVH2 polypeptide or fragment thereof that has an amino acid sequence that is at least 50%, at least 55%, at least 60%, at least 65%, at least 70%, at least 75%, at least 80%, at least 85%, at least 90%, at least 91%, at least 92%, at least 93%, at least 94%, at least 95%, at least 96%, at least 97%, at least 98%, at least 99%, or 100% identical to SEQ ID NO: 504.

[0452] In one aspect, the present disclosure provides a recombinant nucleic acid encoding an SUVH9-like protein. In some embodiments, the recombinant nucleic acid encodes an SUVH9 polypeptide or fragment thereof that has an amino acid sequence that is at least 50%, at least 55%, at least 60%, at least 65%, at least 70%, at least 75%, at least 80%, at least 85%, at least 90%, at least 91%, at least 92%, at least 93%, at least 94%, at least 95%, at least 96%, at least 97%, at least 98%, at least 99%, or 100% identical to SEQ ID NO: 517.

[0453] In one aspect, the present disclosure provides a recombinant nucleic acid encoding an DMS3-like protein. In some embodiments, the recombinant nucleic acid encodes an DMS3 polypeptide or fragment thereof that has an amino acid sequence that is at least 50%, at least 55%, at least 60%, at least 65%, at least 70%, at least 75%, at least 80%, at least 85%, at least 90%, at least 91%, at least 92%, at least 93%, at least 94%, at least 95%, at least 96%, at least 97%, at least 98%, at least 99%, or 100% identical to SEQ ID NO: 531.

[0454] In one aspect, the present disclosure provides a recombinant nucleic acid encoding an MORC6-like protein. In some embodiments, the recombinant nucleic acid encodes an MORC6 polypeptide or fragment thereof that has an amino acid sequence that is at least 50%, at least 55%, at least 60%, at least 65%, at least 70%, at least 75%, at least 80%, at least 85%, at least 90%, at least 91%, at least 92%, at least 93%, at least 94%, at least 95%, at least 96%, at least 97%, at least 98%, at least 99%, or 100% identical to SEQ ID NO: 542.

[0455] In one aspect, the present disclosure provides a recombinant nucleic acid encoding an SUVR2-like protein. In some embodiments, the recombinant nucleic acid encodes an SUVR2 polypeptide or fragment thereof that has an amino acid sequence that is at least 50%, at least 55%, at least 60%, at least 65%, at least 70%, at least 75%, at least 80%, at least 85%, at least 90%, at least 91%, at least 92%, at least 93%, at least 94%, at least 95%, at least 96%, at least 97%, at least 98%, at least 99%, or 100% identical to SEQ ID NO: 554.

[0456] In one aspect, the present disclosure provides a recombinant nucleic acid encoding an DRD1-like protein. In some embodiments, the recombinant nucleic acid encodes an DRD1 polypeptide or fragment thereof that has an amino acid sequence that is at least 50%, at least 55%, at least 60%, at least 65%, at least 70%, at least 75%, at least 80%, at least 85%, at least 90%, at least 91%, at least 92%, at least 93%, at least 94%, at least 95%, at least 96%, at least 97%, at least 98%, at least 99%, or 100% identical to SEQ ID NO: 566.

[0457] In one aspect, the present disclosure provides a recombinant nucleic acid encoding an RDM1-like protein. In some embodiments, the recombinant nucleic acid encodes an RDM1 polypeptide or fragment thereof that has an amino acid sequence that is at least 50%, at least 55%, at least 60%, at least 65%, at least 70%, at least 75%, at least 80%, at least 85%, at least 90%, at least 91%, at least 92%, at least 93%, at least 94%, at least 95%, at least 96%, at least 97%, at least 98%, at least 99%, or 100% identical to SEQ ID NO: 578.

[0458] In one aspect, the present disclosure provides a recombinant nucleic acid encoding an DRM3-like protein. In some embodiments, the recombinant nucleic acid encodes an DRM3 polypeptide or fragment thereof that has an amino acid sequence that is at least 50%, at least 55%, at least 60%, at least 65%, at least 70%, at least 75%, at least 80%, at least 85%, at least 90%, at least 91%, at least 92%, at least 93%, at least 94%, at least 95%, at least 96%, at least 97%, at least 98%, at least 99%, or 100% identical to SEQ ID NO: 588.

[0459] In one aspect, the present disclosure provides a recombinant nucleic acid encoding an DRM2-like protein. In some embodiments, the recombinant nucleic acid encodes an DRM2 polypeptide or fragment thereof that has an amino acid sequence that is at least 50%, at least 55%, at least 60%, at least 65%, at least 70%, at least 75%, at least 80%, at least 85%, at least 90%, at least 91%, at least 92%, at least 93%, at least 94%, at least 95%, at least 96%, at least 97%, at least 98%, at least 99%, or 100% identical to SEQ ID NO: 600.

[0460] In one aspect, the present disclosure provides a recombinant nucleic acid encoding an FRG-like protein. In some embodiments, the recombinant nucleic acid encodes an FRG polypeptide or fragment thereof that has an amino acid sequence that is at least 50%, at least 55%, at least 60%, at least 65%, at least 70%, at least 75%, at least 80%, at least 85%, at least 90%, at least 91%, at least 92%, at least 93%, at least 94%, at least 95%, at least 96%, at least 97%, at least 98%, at least 99%, or 100% identical to SEQ ID NO: 612.

[0461] In one aspect, the present disclosure provides a recombinant nucleic acid encoding an DRM2-MTase-like protein. In some embodiments, the recombinant nucleic acid encodes an DRM2-MTase polypeptide or fragment thereof that has an amino acid sequence that is at least 50%, at least 55%, at least 60%, at least 65%, at least 70%, at least 75%, at least 80%, at least 85%, at least 90%, at least 91%, at least 92%, at least 93%, at least 94%, at least 95%, at least 96%, at least 97%, at least 98%, at least 99%, or 100% identical to SEQ ID NO: 679.

[0462] In one aspect, the present disclosure provides a recombinant nucleic acid encoding an SssI-like protein. In some embodiments, the recombinant nucleic acid encodes an SssI polypeptide or fragment thereof that has an amino acid sequence that is at least 50%, at least 55%, at least 60%, at least 65%, at least 70%, at least 75%, at least 80%, at least 85%, at least 90%, at least 91%, at least 92%, at least 93%, at least 94%, at least 95%, at least 96%, at least 97%, at least 98%, at least 99%, or 100% identical to SEQ ID NO: 680.

[0463] In one aspect, the present disclosure provides a recombinant nucleic acid encoding an ATRX-like protein. In some embodiments, the recombinant nucleic acid encodes an ATRX polypeptide or fragment thereof that has an amino acid sequence that is at least 50%, at least 55%, at least 60%, at least 65%, at least 70%, at least 75%, at least 80%, at least 85%, at least 90%, at least 91%, at least 92%, at least 93%, at least 94%, at least 95%, at least 96%, at least 97%, at least 98%, at least 99%, or 100% identical to SEQ ID NO: 681.

[0464] In one aspect, the present disclosure provides a recombinant nucleic acid encoding a MOM1-like protein. In some embodiments, the recombinant nucleic acid encodes a MOM1 polypeptide or fragment thereof that has an amino acid sequence that is at least 50%, at least 55%, at least 60%, at least 65%, at least 70%, at least 75%, at least 80%, at least 85%, at least 90%, at least 91%, at least 92%, at least 93%, at least 94%, at least 95%, at least 96%, at least 97%, at least 98%, at least 99%, or 100% identical to SEQ ID NO: 694.

[0465] In one aspect, the present disclosure provides a recombinant nucleic acid encoding a MORC1-like protein. In some embodiments, the recombinant nucleic acid encodes a MORC1 polypeptide or fragment thereof that has an amino acid sequence that is at least 50%, at least 55%, at least 60%, at least 65%, at least 70%, at least 75%, at least 80%, at least 85%, at least 90%, at least 91%, at least 92%, at least 93%, at least 94%, at least 95%, at least 96%, at least 97%, at least 98%, at least 99%, or 100% identical to SEQ ID NO: 707.

[0466] In one aspect, the present disclosure provides a recombinant nucleic acid encoding a DNMT3A-like protein. In some embodiments, the recombinant nucleic acid encodes a DNMT3A polypeptide or fragment thereof that has an amino acid sequence that is at least 50%, at least 55%, at least 60%, at least 65%, at least 70%, at least 75%, at least 80%, at least 85%, at least 90%, at least 91%, at least 92%, at least 93%, at least 94%, at least 95%, at least 96%, at least 97%, at least 98%, at least 99%, or 100% identical to SEQ ID NO: 818.

[0467] In one aspect, the present disclosure provides a recombinant nucleic acid encoding a DNMT3L-like protein. In some embodiments, the recombinant nucleic acid encodes a DNMT3L polypeptide or fragment thereof that has an amino acid sequence that is at least 50%, at least 55%, at least 60%, at least 65%, at least 70%, at least 75%, at least 80%, at least 85%, at least 90%, at least 91%, at least 92%, at least 93%, at least 94%, at least 95%, at least 96%, at least 97%, at least 98%, at least 99%, or 100% identical to SEQ ID NO: 829.

[0468] In one aspect, the present disclosure provides a recombinant nucleic acid encoding a DNMT3A-DNMT3L fusion protein. In some embodiments, the recombinant nucleic acid encodes a DNMT3A-DNMT3L fusion polypeptide or fragment thereof that has an amino acid sequence that is at least 50%, at least 55%, at least 60%, at least 65%, at least 70%, at least 75%, at least 80%, at least 85%, at least 90%, at least 91%, at least 92%, at least 93%, at least 94%, at least 95%, at least 96%, at least 97%, at least 98%, at least 99%, or 100% identical to SEQ ID NO: 859.

[0469] In one aspect, the present disclosure provides a recombinant nucleic acid encoding a MBD9-like protein. In some embodiments, the recombinant nucleic acid encodes a MBD9 polypeptide or fragment thereof that has an amino acid sequence that is at least 50%, at least 55%, at least 60%, at least 65%, at least 70%, at least 75%, at least 80%, at least 85%, at least 90%, at least 91%, at least 92%, at least 93%, at least 94%, at least 95%, at least 96%, at least 97%, at least 98%, at least 99%, or 100% identical to SEQ ID NO: 830.

[0470] Sequences of the polynucleotides of the present disclosure may be prepared by various suitable methods known in the art, including, for example, direct chemical synthesis or cloning. For direct chemical synthesis, formation of a polymer of nucleic acids typically involves sequential addition of 3′-blocked and 5′-blocked nucleotide monomers to the terminal 5′-hydroxyl group of a growing nucleotide chain, wherein each addition is effected by nucleophilic attack of the terminal 5′-hydroxyl group of the growing chain on the 3′-position of the added monomer, which is typically a phosphorus derivative, such as a phosphotriester, phosphoramidite, or the like. Such methodology is known to those of ordinary skill in the art and is described in the pertinent texts and literature (e.g., in Matteucci et al., (1980) Tetrahedron Lett 21:719-722; U.S. Pat. Nos. 4,500,707; 5,436,327; and 5,700,637). In addition, the desired sequences may be isolated from natural sources by splitting DNA using appropriate restriction enzymes, separating the fragments using gel electrophoresis, and thereafter, recovering the desired polynucleotide sequence from the gel via techniques known to those of ordinary skill in the art, such as utilization of polymerase chain reactions (PCR; e.g., U.S. Pat. No. 4,683,195).

[0471] The nucleic acids employed in the methods and compositions described herein may be codon optimized relative to a parental template for expression in a particular host cell. Cells differ in their usage of particular codons, and codon bias corresponds to relative abundance of particular tRNAs in a given cell type. By altering codons in a sequence so that they are tailored to match with the relative abundance of corresponding tRNAs, it is possible to increase expression of a product (e.g. a polypeptide) from a nucleic acid. Similarly, it is possible to decrease expression by deliberately choosing codons corresponding to rare tRNAs. Thus, codon optimization/deoptimization can provide control over nucleic acid expression in a particular cell type (e.g. bacterial cell, plant cell, mammalian cell, etc.). Methods of codon optimizing a nucleic acid for tailored expression in a particular cell type are well-known to those of skill in the art.

### Methods of Identifying Sequence Similarity

[0472] Various methods are known to those of skill in the art for identifying similar (e.g. homologs, orthologs, paralogs, etc.) polypeptide and/or polynucleotide sequences, including phylogenetic methods, sequence similarity analysis, and hybridization methods.

[0473] Phylogenetic trees may be created for a gene family by using a program such as CLUSTAL (Thompson et al. Nucleic Acids Res. 22: 4673-4680 (1994); Higgins et al. Methods Enzymol 266: 383-402 (1996)) or MEGA (Tamura et al. Mol. Biol. & Evo. 24:1596-1599 (2007)). Once an initial tree for genes from one species is created, potential orthologous sequences can be placed in the phylogenetic tree and their relationships to genes from the species of interest can be determined. Evolutionary relationships may also be inferred using the Neighbor-Joining method (Saitou and Nei, Mol. Biol. & Evo. 4:406-425 (1987)). Homologous sequences may also be identified by a reciprocal BLAST strategy. Evolutionary distances may be computed using the Poisson correction method (Zuckerkandl and Pauling, pp. 97-166 in Evolving Genes and Proteins, edited by V. Bryson and H. J. Vogel. Academic Press, New York (1965)).

[0474] In addition, evolutionary information may be used to predict gene function. Functional predictions of genes can be greatly improved by focusing on how genes became similar in sequence (i.e. by evolutionary processes) rather than on the sequence similarity itself (Eisen, Genome Res. 8: 163-167 (1998)). Many specific examples exist in which gene function has been shown to correlate well with gene phylogeny (Eisen, Genome Res. 8: 163-167 (1998)). By using a phylogenetic analysis, one skilled in the art would recognize that the ability to deduce similar functions conferred by closely-related polypeptides is predictable.

[0475] When a group of related sequences are analyzed using a phylogenetic program such as CLUSTAL, closely related sequences typically cluster together or in the same clade (a group of similar genes). Groups of similar genes can also be identified with pair-wise BLAST analysis (Feng and Doolittle, J. Mol. Evol. 25: 351-360 (1987)). Analysis of groups of similar genes with similar function that fall within one clade can yield sub-sequences that are particular to the clade. These sub-sequences, known as consensus sequences, can not only be used to define the sequences within each clade, but define the functions of these genes; genes within a clade may contain paralogous sequences, or orthologous sequences that share the same function (see also, for example, Mount, Bioinformatics: Sequence and Genome Analysis Cold Spring Harbor Laboratory Press, Cold Spring Harbor, N.Y., page 543 (2001)).

[0476] To find sequences that are homologous to a reference sequence, BLAST nucleotide searches can be performed with the BLASTN program, score=100, wordlength=12, to obtain nucleotide sequences homologous to a nucleotide sequence encoding a protein of the disclosure. BLAST protein searches can be performed with the BLASTX program, score=50, wordlength=3, to obtain amino acid sequences homologous to a protein or polypeptide of the disclosure. To obtain gapped alignments for comparison purposes, Gapped BLAST (in BLAST 2.0) can be utilized as described in Altschul et al. (1997) Nucleic Acids Res. 25:3389. Alternatively, PSI-BLAST (in BLAST 2.0) can be used to perform an iterated search that detects distant relationships between molecules. See Altschul et al. (1997) supra. When utilizing BLAST, Gapped BLAST, or PSI-BLAST, the default parameters of the respective programs (e.g., BLASTN for nucleotide sequences, BLASTX for proteins) can be used.

[0477] Methods for the alignment of sequences and for the analysis of similarity and identity of polypeptide and polynucleotide sequences are well-known in the art.

[0478] As used herein “sequence identity” refers to the percentage of residues that are identical in the same positions in the sequences being analyzed. As used herein “sequence similarity” refers to the percentage of residues that have similar biophysical/biochemical characteristics in the same positions (e.g. charge, size, hydrophobicity) in the sequences being analyzed.

[0479] Methods of alignment of sequences for comparison are well-known in the art, including manual alignment and computer assisted sequence alignment and analysis. This latter approach is a preferred approach in the present disclosure, due to the increased throughput afforded by computer assisted methods. As noted below, a variety of computer programs for performing sequence alignment are available, or can be produced by one of skill.

[0480] The determination of percent sequence identity and/or similarity between any two sequences can be accomplished using a mathematical algorithm. Examples of such mathematical algorithms are the algorithm of Myers and Miller, CABIOS 4:11-17 (1988); the local homology algorithm of Smith et al., Adv. Appl. Math. 2:482 (1981); the homology alignment algorithm of Needleman and Wunsch, J. Mol. Biol. 48:443-453 (1970); the search-for-similarity-method of Pearson and Lipman, Proc. Natl. Acad. Sci. 85:2444-2448 (1988); the algorithm of Karlin and Altschul, Proc. Natl. Acad. Sci. USA 87:2264-2268 (1990), modified as in Karlin and Altschul, Proc. Natl. Acad. Sci. USA 90:5873-5877 (1993).

[0481] Computer implementations of these mathematical algorithms can be utilized for comparison of sequences to determine sequence identity and/or similarity. Such implementations include, for example: CLUSTAL in the PC/Gene program (available from Intelligenetics, Mountain View, Calif.); the AlignX program, version 10.3.0 (Invitrogen, Carlsbad, Calif.) and GAP, BESTFIT, BLAST, FASTA, and TFASTA in the Wisconsin Genetics Software Package, Version 8 (available from Genetics Computer Group (GCG), 575 Science Drive, Madison, Wis., USA). Alignments using these programs can be performed using the default parameters. The CLUSTAL program is well described by Higgins et al. Gene 73:237-244 (1988); Higgins et al. CABIOS 5:151-153 (1989); Corpet et al., Nucleic Acids Res. 16:10881-90 (1988); Huang et al. CABIOS 8:155-65 (1992); and Pearson et al., Meth. Mol. Biol. 24:307-331 (1994). The BLAST programs of Altschul et al. J. Mol. Biol. 215:403-410 (1990) are based on the algorithm of Karlin and Altschul (1990) supra.

[0482] Polynucleotides homologous to a reference sequence can be identified by hybridization to each other under stringent or under highly stringent conditions. Single stranded polynucleotides hybridize when they associate based on a variety of well characterized physical-chemical forces, such as hydrogen bonding, solvent exclusion, base stacking and the like. The stringency of a hybridization reflects the degree of sequence identity of the nucleic acids involved, such that the higher the stringency, the more similar are the two polynucleotide strands. Stringency is influenced by a variety of factors, including temperature, salt concentration and composition, organic and non-organic additives, solvents, etc. present in both the hybridization and wash solutions and incubations (and number thereof), as described in more detail in references cited below (e.g., Sambrook et al., Molecular Cloning: A Laboratory Manual, 2nd Ed., Vol. 1-3, Cold Spring Harbor Laboratory, Cold Spring Harbor, N.Y. (“Sambrook”) (1989); Berger and Kimmel, Guide to Molecular Cloning Techniques, Methods in Enzymology, vol. 152 Academic Press, Inc., San Diego, Calif. (“Berger and Kimmel”) (1987); and Anderson and Young, “Quantitative Filter Hybridisation.” In: Hames and Higgins, ed., Nucleic Acid Hybridisation, A Practical Approach. Oxford, TRL Press, 73-111 (1985)).

[0483] Encompassed by the disclosure are polynucleotide sequences that are capable of hybridizing to the disclosed polynucleotide sequences and fragments thereof under various conditions of stringency (see, for example, Wahl and Berger, Methods Enzymol. 152: 399-407 (1987); and Kimmel, Methods Enzymo. 152: 507-511, (1987)). Full length cDNA, homologs, orthologs, and paralogs of polynucleotides of the present disclosure may be identified and isolated using well-known polynucleotide hybridization methods.

[0484] With regard to hybridization, conditions that are highly stringent, and means for achieving them, are well known in the art. See, for example, Sambrook et al. (1989) (supra); Berger and Kimmel (1987) pp. 467-469 (supra); and Anderson and Young (1985)(supra).

[0485] Hybridization experiments are generally conducted in a buffer of pH between 6.8 to 7.4, although the rate of hybridization is nearly independent of pH at ionic strengths likely to be used in the hybridization buffer (Anderson and Young (1985)(supra)). In addition, one or more of the following may be used to reduce non-specific hybridization: sonicated salmon sperm DNA or another non-complementary DNA, bovine serum albumin, sodium pyrophosphate, sodium dodecylsulfate (SDS), polyvinyl-pyrrolidone, ficoll and Denhardt's solution. Dextran sulfate and polyethylene glycol 6000 act to exclude DNA from solution, thus raising the effective probe DNA concentration and the hybridization signal within a given unit of time. In some instances, conditions of even greater stringency may be desirable or required to reduce non-specific and/or background hybridization. These conditions may be created with the use of higher temperature, lower ionic strength and higher concentration of a denaturing agent such as formamide.

[0486] Stringency conditions can be adjusted to screen for moderately similar fragments such as homologous sequences from distantly related organisms, or to highly similar fragments such as genes that duplicate functional enzymes from closely related organisms. The stringency can be adjusted either during the hybridization step or in the post-hybridization washes. Salt concentration, formamide concentration, hybridization temperature and probe lengths are variables that can be used to alter stringency. As a general guideline, high stringency is typically performed at Tₘ-5° C. to Tₘ-20° C., moderate stringency at Tₘ-20° C. to Tₘ-35° C. and low stringency at Tₘ-35° C. to Tₘ-50° C. for duplex >150 base pairs. Hybridization may be performed at low to moderate stringency (25-50° C. below Tₘ), followed by post-hybridization washes at increasing stringencies. Maximum rates of hybridization in solution are determined empirically to occur at Tₘ-25° C. for DNA-DNA duplex and Tₘ-15° C. for RNA-DNA duplex. Optionally, the degree of dissociation may be assessed after each wash step to determine the need for subsequent, higher stringency wash steps.

[0487] High stringency conditions may be used to select for nucleic acid sequences with high degrees of identity to the disclosed sequences. An example of stringent hybridization conditions obtained in a filter-based method such as a Southern or northern blot for hybridization of complementary nucleic acids that have more than 100 complementary residues is about 5° C. to 20° C. lower than the thermal melting point (Tₘ) for the specific sequence at a defined ionic strength and pH.

[0488] Hybridization and wash conditions that may be used to bind and remove polynucleotides with less than the desired homology to the nucleic acid sequences or their complements of the present disclosure include, for example: 6×SSC and 1% SDS at 65° C.; 50% formamide, 4×SSC at 42° C.; 0.5×SSC to 2.0×SSC, 0.1% SDS at 50° C. to 65° C.; or 0.1×SSC to 2×SSC, 0.1% SDS at 50° C.-65° C.; with a first wash step of, for example, 10 minutes at about 42° C. with about 20% (v/v) formamide in 0.1×SSC, and with, for example, a subsequent wash step with 0.2×SSC and 0.1% SDS at 65° C. for 10, 20 or 30 minutes.

[0489] For identification of less closely related homologs, wash steps may be performed at a lower temperature, e.g., 50° C. An example of a low stringency wash step employs a solution and conditions of at least 25° C. in 30 mM NaCl, 3 mM trisodium citrate, and 0.1% SDS over 30 min. Greater stringency may be obtained at 42° C. in 15 mM NaCl, with 1.5 mM trisodium citrate, and 0.1% SDS over 30 min. Wash procedures will generally employ at least two final wash steps. Additional variations on these conditions will be readily apparent to those skilled in the art (see, for example, US Patent Application No. 20010010913).

[0490] If desired, one may employ wash steps of even greater stringency, including conditions of 65° C. −68° C. in a solution of 15 mM NaCl, 1.5 mM trisodium citrate, and 0.1% SDS, or about 0.2×SSC, 0.1% SDS at 65° C. and washing twice, each wash step of 10, 20 or 30 min in duration, or about 0.1×SSC, 0.1% SDS at 65° C. and washing twice for 10, 20 or 30 min. Hybridization stringency may be increased further by using the same conditions as in the hybridization steps, with the wash temperature raised about 3° C. to about 5° C., and stringency may be increased even further by using the same conditions except the wash temperature is raised about 6° C. to about 9° C.

### Target Nucleic Acids of the Present Disclosure

[0491] The recombinant proteins of the present disclosure may be targeted to specific target nucleic acids to induce gene silencing. The recombinant proteins may be, for example, SHH1-like proteins, SHH2-like proteins, AGO4-like proteins, HDA6-like proteins, NRPD1-like proteins, NRPE1-like proteins, JMJ14-like proteins, RDR2-like proteins, NRPD2A/NRPE2-like proteins, NRPB3/NRPD3/NRPE3A-like proteins, NRPE3B-like proteins, NRPB11/NRPD11/NRPE11-like proteins, NRPB10/NRPD10/NRPE10-like proteins, NRPB12/NRPD12/NRPE12-like proteins, NRPB6A/NRPD6A/NRPE6A-like proteins, NRPB6B/NRPD6B/NRPE6B-like proteins, NRPB8A/NRPE8A-like proteins, NRPB8B/NRPD8B/NRPE8B-like proteins, NRPE5-like proteins, NRPD4/NRPE4-like proteins, NRPE7-like proteins, NRPD7-like proteins, NRPB5/NRPD5-like proteins, NRPB9A/NRPD9A/NRPE9A-like proteins, NRPB9B/NRPD9B/NRPE9B-like proteins, ATRX-like proteins, MOM1-like proteins, MORC1-like proteins, SssI-like proteins, DRM2-MTase-like proteins, DNMT3A-like proteins, DNMT3L-like proteins, MBD9-like proteins, SUVH2-like proteins, SUVH9-like proteins, DMS3-like proteins, MORC6-like proteins, SUVR2-like proteins, DRD1-like proteins, RDM1-like proteins, DRM3-like proteins, DRM2-like proteins, and/or FRG-like proteins.

[0492] In some embodiments, the SHH1-like proteins, SHH2-like proteins, AGO4-like proteins, HDA6-like proteins, NRPD1-like proteins, NRPE1-like proteins, JMJ14-like proteins, RDR2-like proteins, NRPD2A/NRPE2-like proteins, NRPB3/NRPD3/NRPE3A-like proteins, NRPE3B-like proteins, NRPB11/NRPD11/NRPE11-like proteins, NRPB10/NRPD10/NRPE10-like proteins, NRPB12/NRPD12/NRPE12-like proteins, NRPB6A/NRPD6A/NRPE6A-like proteins, NRPB6B/NRPD6B/NRPE6B-like proteins, NRPB8A/NRPE8A-like proteins, NRPB8B/NRPD8B/NRPE8B-like proteins, NRPE5-like proteins, NRPD4/NRPE4-like proteins, NRPE7-like proteins, NRPD7-like proteins, NRPB5/NRPD5-like proteins, NRPB9A/NRPD9A/NRPE9A-like proteins, NRPB9B/NRPD9B/NRPE9B-like proteins, ATRX-like proteins, MOM1-like proteins, MORC1-like proteins, SssI-like proteins, DRM2-MTase-like proteins, DNMT3A-like proteins, DNMT3L-like proteins, MBD9-like proteins, SUVH2-like proteins, SUVH9-like proteins, DMS3-like proteins, MORC6-like proteins, SUVR2-like proteins, DRD1-like proteins, RDM1-like proteins, DRM3-like proteins, DRM2-like proteins, and/or FRG-like proteins are targeted to a specific nucleic acid via a heterologous DNA-binding domain.

[0493] In some embodiments, the SHH1-like proteins, SHH2-like proteins, AGO4-like proteins, HDA6-like proteins, NRPD1-like proteins, NRPE1-like proteins, JMJ14-like proteins, RDR2-like proteins, NRPD2A/NRPE2-like proteins, NRPB3/NRPD3/NRPE3A-like proteins, NRPE3B-like proteins, NRPB11/NRPD11/NRPE11-like proteins, NRPB10/NRPD10/NRPE10-like proteins, NRPB2/NRPD12/NRPE12-like proteins, NRPB6A/NRPD6A/NRPE6A-like proteins, NRPB6B/NRPD6B/NRPE6B-like proteins, NRPB8A/NRPE8A-like proteins, NRPB8B/NRPD8B/NRPE8B-like proteins, NRPE5-like proteins, NRPD4/NRPE4-like proteins, NRPE7-like proteins, NRPD7-like proteins, NRPB5/NRPD5-like proteins, NRPB9A/NRPD9A/NRPE9A-like proteins, NRPB9B/NRPD9B/NRPE9B-like proteins, ATRX-like proteins, MOM1-like proteins, MORC1-like proteins, SssI-like proteins, DRM2-MTase-like proteins, DNMT3A-like proteins, DNMT3L-like proteins, MBD9-like proteins, SUVH2-like proteins, SUVH9-like proteins, DMS3-like proteins, MORC6-like proteins, SUVR2-like proteins, DRD1-like proteins, RDM1-like proteins, DRM3-like proteins, DRM2-like proteins, and/or FRG-like proteins reduce expression of a gene of interest by being targeted to the nucleic acid by a guide RNA.

[0494] In some embodiments, the SHH1-like proteins, SHH2-like proteins, AGO4-like proteins, HDA6-like proteins, NRPD1-like proteins, NRPE1-like proteins, JMJ14-like proteins, RDR2-like proteins, NRPD2A/NRPE2-like proteins, NRPB3/NRPD3/NRPE3A-like proteins, NRPE3B-like proteins, NRPB11/NRPD11/NRPE11-like proteins, NRPB10/NRPD10/NRPE10-like proteins, NRPB2/NRPD12/NRPE12-like proteins, NRPB6A/NRPD6A/NRPE6A-like proteins, NRPB6B/NRPD6B/NRPE6B-like proteins, NRPB8A/NRPE8A-like proteins, NRPB8B/NRPD8B/NRPE8B-like proteins, NRPE5-like proteins, NRPD4/NRPE4-like proteins, NRPE7-like proteins, NRPD7-like proteins, NRPB5/NRPD5-like proteins, NRPB9A/NRPD9A/NRPE9A-like proteins, NRPB9B/NRPD9B/NRPE9B-like proteins, ATRX-like proteins, MOM1-like proteins, MORC1-like proteins, SssI-like proteins, DRM2-MTase-like proteins, DNMT3A-like proteins, DNMT3L-like proteins, MBD9-like proteins, SUVH2-like proteins, SUVH9-like proteins, DMS3-like proteins, MORC6-like proteins, SUVR2-like proteins, DRD1-like proteins, RDM1-like proteins, DRM3-like proteins, DRM2-like proteins, and/or FRG-like proteins silence expression of a gene of interest by inducing RNA-directed DNA methylation at the target nucleic acid.

[0495] In some embodiments, a target nucleic acid of the present disclosure is a nucleic acid that is located at any location within a target gene that provides a suitable location for reducing expression of the target gene. The target nucleic acid may be located within the coding region of a target gene or upstream or downstream thereof. Moreover, the target nucleic acid may reside endogenously in a target gene or may be inserted into the gene, e.g., heterologous, for example, using techniques such as homologous recombination. For example, a target gene of the present disclosure can be operably linked to a control region, such as a promoter, that contains a sequence that can be recognized by a crRNA/tracrRNA and/or a guide RNA of the present disclosure such that recombinant proteins of the present disclosure are targeted to that sequence. Also, the target nucleic acid may be one that is able to be bound by a DNA-binding domain that is recombinantly fused to an epigenetic regulator of the present disclosure. In this sense, a target nucleic acid of the present disclosure is targeted based on the particular nucleotide sequence in the target nucleic acid that is recognized by the targeting portion of the DNA-binding domain, or the crRNA or guide RNA that is used according to the methods of the present disclosure.

[0496] In some embodiments, the target nucleic acid is endogenous to the plant where the expression of one or more genes is reduced by an epigenetic regulator-like protein (e.g. SHH1-like proteins, SHH2-like proteins, AGO4-like proteins, HDA6-like proteins, NRPD1-like proteins, NRPE1-like proteins, JMJ14-like proteins, RDR2-like proteins, NRPD2A/NRPE2-like proteins, NRPB3/NRPD3/NRPE3A-like proteins, NRPE3B-like proteins, NRPB11/NRPD11/NRPE11-like proteins, NRPB10/NRPD10/NRPE10-like proteins, NRPB12/NRPD12/NRPE12-like proteins, NRPB6A/NRPD6A/NRPE6A-like proteins, NRPB6B/NRPD6B/NRPE6B-like proteins, NRPB8A/NRPE8A-like proteins, NRPB8B/NRPD8B/NRPE8B-like proteins, NRPE5-like proteins, NRPD4/NRPE4-like proteins, NRPE7-like proteins, NRPD7-like proteins, NRPB5/NRPD5-like proteins, NRPB9A/NRPD9A/NRPE9A-like proteins, NRPB9B/NRPD9B/NRPE9B-like proteins, ATRX-like proteins, MOM1-like proteins, MORC1-like proteins, SssI-like proteins, DRM2-MTase-like proteins, DNMT3A-like proteins, DNMT3L-like proteins, MBD9-like proteins, SUVH2-like proteins, SUVH9-like proteins, DMS3-like proteins, MORC6-like proteins, SUVR2-like proteins, DRD1-like proteins, RDM1-like proteins, DRM3-like proteins, DRM2-like proteins, and/or FRG-like proteins) of the present disclosure. In some embodiments, the target nucleic acid is a transgene of interest that has been inserted into a plant. Methods of introducing transgenes into plants are well known in the art. Transgenes may be inserted into plants in order to provide a production system for a desired protein, or may be added to the genetic compliment in order to modulate the metabolism of a plant.

[0497] Examples of suitable endogenous plant genes whose expression can be reduced by an epigenetic regulator-like protein of the present disclosure may include, for example, genes that prevent the enhancement of one or more desired traits and genes that prevent increased crop yields. For example, SHH1-like proteins, SHH2-like proteins, AGO4-like proteins, HDA6-like proteins, NRPD1-like proteins, NRPE1-like proteins, JMJ14-like proteins, RDR2-like proteins, NRPD2A/NRPE2-like proteins, NRPB3/NRPD3/NRPE3A-like proteins, NRPE3B-like proteins, NRPB11/NRPD11/NRPE11-like proteins, NRPB10/NRPD10/NRPE10-like proteins, NRPB12/NRPD12/NRPE12-like proteins, NRPB6A/NRPD6A/NRPE6A-like proteins, NRPB6B/NRPD6B/NRPE6B-like proteins, NRPB8A/NRPE8A-like proteins, NRPB8B/NRPD8B/NRPE8B-like proteins, NRPE5-like proteins, NRPD4/NRPE4-like proteins, NRPE7-like proteins, NRPD7-like proteins, NRPB5/NRPD5-like proteins, NRPB9A/NRPD9A/NRPE9A-like proteins, NRPB9B/NRPD9B/NRPE9B-like proteins, ATRX-like proteins, MOM1-like proteins, MORC1-like proteins, SssI-like proteins, DRM2-MTase-like proteins, DNMT3A-like proteins, DNMT3L-like proteins, MBD9-like proteins, SUVH2-like proteins, SUVH9-like proteins, DMS3-like proteins, MORC6-like proteins, SUVR2-like proteins, DRD1-like proteins, RDM1 like proteins, DRM3-like proteins, DRM2-like proteins, and/or FRG-like proteins of the present disclosure may be used to reduce the expression of the gene GA1 in plants, which would create plants that are less sensitive to gibberellin. In embodiments relating to research, an epigenetic regulator-like protein of the present disclosure may be utilized to silence the expression of an endogenous gene of interest in order to generate mutant plants in which to study the function of the gene of interest.

[0498] Examples of suitable transgenes present in plants whose expression can be reduced by an epigenetic regulator-like protein of the present disclosure may include, for example, transgenes that are not useful in certain genetic backgrounds, transgenes that are harmful in certain genetic backgrounds, and transgenes that are expressed in certain tissues that are undesirable. For example, in the case of transgenes that are expressed in certain tissues that are undesirable, SHH1-like proteins, SHH2-like proteins, AGO4-like proteins, HDA6-like proteins, NRPD1-like proteins, NRPE1-like proteins, JMJ14-like proteins, RDR2-like proteins, NRPD2A/NRPE2-like proteins, NRPB3/NRPD3/NRPE3A-like proteins, NRPE3B-like proteins, NRPB11/NRPD11/NRPE11-like proteins, NRPB10/NRPD10/NRPE10-like proteins, NRPB12/NRPD12/NRPE12-like proteins, NRPB6A/NRPD6A/NRPE6A-like proteins, NRPB6B/NRPD6B/NRPE6B-like proteins, NRPB8A/NRPE8A-like proteins, NRPB8B/NRPD8B/NRPE8B-like proteins, NRPE5-like proteins, NRPD4/NRPE4-like proteins, NRPE7-like proteins, NRPD7-like proteins, NRPB5/NRPD5-like proteins, NRPB9A/NRPD9A/NRPE9A-like proteins, NRPB9B/NRPD9B/NRPE9B-like proteins, ATRX-like proteins, MOM1-like proteins, MORC1-like proteins, SssI-like proteins, DRM2-MTase-like proteins, DNMT3A-like proteins, DNMT3L-like proteins, MBD9-like proteins, SUVH2-like proteins, SUVH9-like proteins, DMS3-like proteins, MORC6-like proteins, SUVR2-like proteins, DRD1-like proteins, RDM1 like proteins, DRM3-like proteins, DRM2-like proteins, and/or FRG-like proteins of the present disclosure can be utilized to silence the expression of such transgenes in specific tissues at specific times by operably linking tissue specific promoters to the recombinant polypeptides of the present disclosure. In embodiments relating to research, an epigenetic regulator-like protein of the present disclosure may be utilized to dynamically study transgenes of interest by controlling the induction/silencing of the transgenes.

[0499] Suitable target nucleic acids will be readily apparent to one of skill in the art depending on the particular need or outcome. The target nucleic acid may be in e.g. a region of euchromatin (e.g. highly expressed gene), or the target nucleic acid may be in a region of heterochromatin (e.g. centromere DNA).

### Plants of the Present Disclosure

[0500] Certain aspects of the present disclosure relate to plants containing one or more epigenetic regulator-like proteins that are targeted to one or more target nucleic acids in the plant and reduce the expression of the one or more target nucleic acids.

[0501] As used herein, a “plant” refers to any of various photosynthetic, eukaryotic multi-cellular organisms of the kingdom Plantae, characteristically producing embryos, containing chloroplasts, having cellulose cell walls and lacking locomotion. As used herein, a “plant” includes any plant or part of a plant at any stage of development, including seeds, suspension cultures, plant cells, embryos, meristematic regions, callus tissue, leaves, roots, shoots, gametophytes, sporophytes, pollen, microspores, and progeny thereof. Also included are cuttings, and cell or tissue cultures. As used in conjunction with the present disclosure, plant tissue includes, for example, whole plants, plant cells, plant organs, e.g., leafs, stems, roots, meristems, plant seeds, protoplasts, callus, cell cultures, and any groups of plant cells organized into structural and/or functional units.

[0502] Any plant cell may be used in the present disclosure so long as it remains viable after being transformed with a sequence of nucleic acids. Preferably, the plant cell is not adversely affected by the transduction of the necessary nucleic acid sequences, the subsequent expression of the proteins or the resulting intermediates.

[0503] As disclosed herein, a broad range of plant types may be modified to incorporate an epigenetic regulator-like protein of the present disclosure. Suitable plants that may be modified include both monocotyledonous (monocot) plants and dicotyledonous (dicot) plants.

[0504] Examples of suitable plants may include, for example, species of the Family Gramineae, including Sorghum bicolor and Zea mays; species of the genera: Cucurbita, Rosa, Vitis, Juglans, Fragaria, Lotus, Medicago, Onobrychis, Trifolium, Trigonella, Vigna, Citrus, Linum, Geranium, Manihot, Daucus, Arabidopsis, Brassica, Raphanus, Sinapis, Atropa, Capsicum, Datura, Hyoscyamus, Lycopersicon, Nicotiana, Solanum, Petunia, Digitalis, Majorana, Ciahorium, Helianthus, Lactuca, Bromus, Asparagus, Antirrhinum, Heterocallis, Nemesis, Pelargonium, Panieum, Pennisetum, Ranunculus, Senecio, Salpiglossis, Cucumis, Browaalia, Glycine, Pisum, Phaseolus, Lolium, Oryza, Avena, Hordeum, Secale, and Triticum.

[0505] In some embodiments, plant cells may include, for example, those from corn (Zea mays), canola (Brassica napus, Brassica rapa ssp.), Brassica species useful as sources of seed oil, alfalfa (Medicago sativa), rice (Oryza sativa), rye (Secale cereale), sorghum (Sorghum bicolor, Sorghum vulgare), millet (e.g., pearl millet (Pennisetum glaucum), proso millet (Panicum miliaceum), foxtail millet (Setaria italica), finger millet (Eleusine coracana)), sunflower (Helianthus annuus), safflower (Carthamus tinctorius), wheat (Triticum aestivum), duckweed (Lemna), soybean (Glycine max), tobacco (Nicotiana tabacum), potato (Solanum tuberosum), peanuts (Arachis hypogaea), cotton (Gossypium barbadense, Gossypium hirsutum), sweet potato (Ipomoea batatus), cassava (Manihot esculenta), coffee (Coffea spp.), coconut (Cocos nucijra), pineapple (Ananas comosus), citrus trees (Citrus spp.), cocoa (Theobroma cacao), tea (Camellia sinensis), banana (Musa spp.), avocado (Persea americana), fig (Ficus casica), guava (Psidium guajava), mango (Mangifera indica), olive (Olea europaea), papaya (Carica papaya), cashew (Anacardium occidentale), macadamia (Macadamia spp.), almond (Prunus amygdalus), sugar beets (Beta vulgaris), sugarcane (Saccharum spp.), oats, barley, vegetables, ornamentals, and conifers.

[0506] Examples of suitable vegetables plants may include, for example, tomatoes (Lycopersicon esculentum), lettuce (e.g., Lactuca sativa), green beans (Phaseolus vulgaris), lima beans (Phaseolus limensis), peas (Lathyrus spp.), and members of the genus Cucumis such as cucumber (C. sativus), cantaloupe (C. cantalupensis), and musk melon (C. melo).

[0507] Examples of suitable ornamental plants may include, for example, azalea (Rhododendron spp.), hydrangea (Macrophylla hydrangea), hibiscus (Hibiscus rosasanensis), roses (Rosa spp.), tulips (Tulipa spp.), daffodils (Narcissus spp.), petunias (Petunia hybrida), carnation (Dianthus caryophyllus), poinsettia (Euphorbiapul cherrima), and chrysanthemum.

[0508] Examples of suitable conifer plants may include, for example, loblolly pine (Pinus taeda), slash pine (Pinus elliotii), ponderosa pine (Pinus ponderosa), lodgepole pine (Pinus contorta), Monterey pine (Pinus radiata), Douglas-fir (Pseudotsuga menziesii), Western hemlock (Isuga canadensis), Sitka spruce (Picea glauca), redwood (Sequoia sempervirens), silver fir (Abies amabilis), balsam fir (Abies balsamea), Western red cedar (Thuja plicata), and Alaska yellow-cedar (Chamaecyparis nootkatensis).

[0509] Examples of suitable leguminous plants may include, for example, guar, locust bean, fenugreek, soybean, garden beans, cowpea, mungbean, lima bean, fava bean, lentils, chickpea, peanuts (Arachis sp.), crown vetch (Vicia sp.), hairy vetch, adzuki bean, lupine (Lupinus sp.), trifolium, common bean (Phaseolus sp.), field bean (Pisum sp.), clover (Melilotus sp.) Lotus, trefoil, lens, and false indigo.

[0510] Examples of suitable forage and turf grass may include, for example, alfalfa (Medicago s sp.), orchard grass, tall fescue, perennial ryegrass, creeping bent grass, and redtop.

[0511] Examples of suitable crop plants and model plants may include, for example, Arabidopsis, corn, rice, alfalfa, sunflower, canola, soybean, cotton, peanut, sorghum, wheat, tobacco, and lemna.

[0512] The plants of the present disclosure may be genetically modified in that recombinant nucleic acids have been introduced into the plants, and as such the genetically modified plants do not occur in nature. A suitable plant of the present disclosure is one capable of expressing one or more nucleic acid constructs encoding one or more recombinant proteins. The recombinant proteins encoded by the nucleic acids may be e.g. SHH1-like proteins, SHH2-like proteins, AGO4-like proteins, HDA6-like proteins, NRPD1-like proteins, NRPE1-like proteins, JMJ14-like proteins, RDR2-like proteins, NRPD2A/NRPE2-like proteins, NRPB3/NRPD3/NRPE3A-like proteins, NRPE3B-like proteins, NRPB11/NRPD11/NRPE11-like proteins, NRPB10/NRPD10/NRPE10-like proteins, NRPB12/NRPD12/NRPE12-like proteins, NRPB6A/NRPD6A/NRPE6A-like proteins, NRPB6B/NRPD6B/NRPE6B-like proteins, NRPB8A/NRPE8A-like proteins, NRPB8B/NRPD8B/NRPE8B-like proteins, NRPE5-like proteins, NRPD4/NRPE4-like proteins, NRPE7-like proteins, NRPD7-like proteins, NRPB5/NRPD5-like proteins, NRPB9A/NRPD9A/NRPE9A-like proteins, NRPB9B/NRPD9B/NRPE9B-like proteins, ATRX-like proteins, MOM1-like proteins, MORC1-like proteins, SssI-like proteins, DRM2-MTase-like proteins, DNMT3A-like proteins, DNMT3L-like proteins, MBD9-like proteins, SUVH2-like proteins, SUVH9-like proteins, DMS3-like proteins, MORC6-like proteins, SUVR2-like proteins, DRD1-like proteins, RDM1 like proteins, DRM3-like proteins, DRM2-like proteins, and/or FRG-like proteins.

[0513] As used herein, the terms “transgenic plant” and “genetically modified plant” are used interchangeably and refer to a plant which contains within its genome a recombinant nucleic acid. Generally, the recombinant nucleic acid is stably integrated within the genome such that the polynucleotide is passed on to successive generations. However, in certain embodiments, the recombinant nucleic acid is transiently expressed in the plant. The recombinant nucleic acid may be integrated into the genome alone or as part of a recombinant expression cassette. “Transgenic” is used herein to include any cell, cell line, callus, tissue, plant part or plant, the genotype of which has been altered by the presence of exogenous nucleic acid including those transgenics initially so altered as well as those created by sexual crosses or asexual propagation from the initial transgenic.

[0514] “Recombinant nucleic acid” or “heterologous nucleic acid” or “recombinant polynucleotide” as used herein refers to a polymer of nucleic acids wherein at least one of the following is true: (a) the sequence of nucleic acids is foreign to (i.e., not naturally found in) a given host cell; (b) the sequence may be naturally found in a given host cell, but in an unnatural (e.g., greater than expected) amount; or (c) the sequence of nucleic acids contains two or more subsequences that are not found in the same relationship to each other in nature. For example, regarding instance (c), a recombinant nucleic acid sequence will have two or more sequences from unrelated genes arranged to make a new functional nucleic acid. Specifically, the present disclosure describes the introduction of an expression vector into a plant cell, where the expression vector contains a nucleic acid sequence coding for a protein that is not normally found in a plant cell or contains a nucleic acid coding for a protein that is normally found in a plant cell but is under the control of different regulatory sequences. With reference to the plant cell's genome, then, the nucleic acid sequence that codes for the protein is recombinant. A protein that is referred to as recombinant generally implies that it is encoded by a recombinant nucleic acid sequence which may be present in the plant cell. Recombinant proteins of the present disclosure may also be exogenously supplied directly to host cells (e.g. plant cells).

[0515] A “recombinant” polypeptide, protein, or enzyme of the present disclosure, is a polypeptide, protein, or enzyme that is encoded by a “recombinant nucleic acid” or “heterologous nucleic acid” or “recombinant polynucleotide.”

[0516] In some embodiments, the genes encoding the recombinant proteins in the plant cell may be heterologous to the plant cell. In certain embodiments, the plant cell does not naturally produce the recombinant proteins, and contains heterologous nucleic acid constructs capable of expressing one or more genes necessary for producing those molecules. In certain embodiments, the plant cell does not naturally produce one or more polypeptides of the present disclosure, and is provided the one or more polypeptides through exogenous delivery of the polypeptides directly to the plant cell without the need to express a recombinant nucleic acid encoding the recombinant polypeptide in the plant cell.

[0517] Recombinant nucleic acids and/or recombinant proteins of the present disclosure may be present in host cells (e.g. plant cells). In some embodiments, recombinant nucleic acids are present in an expression vector, and the expression vector may be present in host cells (e.g. plant cells).

[0518] Expression of Recombinant Proteins in Plants

[0519] An epigenetic regulator-like protein of the present disclosure may be introduced into plant cells via any suitable methods known in the art. For example, an SHH1-like protein, an SHH2-like protein, an AGO4-like protein, an HDA6-like protein, an NRPD1-like protein, an NRPE1-like protein, a JMJ14-like protein, an RDR2-like protein, an NRPD2A/NRPE2-like protein, an NRPB3/NRPD3/NRPE3A-like protein, an NRPE3B-like protein, an NRPB11/NRPD11/NRPE11-like protein, an NRPB10/NRPD10/NRPE10-like protein, an NRPB12/NRPD12/NRPE12-like protein, an NRPB6A/NRPD6A/NRPE6A-like protein, an NRPB6B/NRPD6B/NRPE6B-like protein, an NRPB8A/NRPE8A-like protein, an NRPB8B/NRPD8B/NRPE8B-like protein, an NRPE5-like protein, an NRPD4/NRPE4-like protein, an NRPE7-like protein, an NRPD7-like protein, an NRPB5/NRPD5-like protein, an NRPB9A/NRPD9A/NRPE9A-like protein, an NRPB9B/NRPD9B/NRPE9B-like protein, an ATRX-like protein, a MOM1-like protein, a MORC1-like protein, an SssI-like protein, a DRM2-MTase-like protein, a DNMT3A-like protein, a DNMT3L-like protein, a MBD9-like protein, a SUVH2-like protein, a SUVH9-like protein, a DMS3-like protein, a MORC6-like protein, a SUVR2-like protein, a DRD1-like protein, an RDM1-like protein, a DRM3-like protein, a DRM2-like protein, and/or an FRG-like protein can be exogenously added to plant cells and the plant cells are maintained under conditions such that the epigenetic regulator-like protein is targeted to one or more target nucleic acids and reduces the expression of the target nucleic acids in the plant cells. Alternatively, a recombinant nucleic acid encoding an epigenetic regulator-like protein of the present disclosure can be expressed in plant cells and the plant cells are maintained under conditions such that the epigenetic regulator-like protein of the present disclosure is targeted to one or more target nucleic acids and reduces the expression of the target gene in the plant cells. Additionally, in some embodiments, an epigenetic regulator-like protein of the present disclosure may be transiently expressed in a plant via viral infection of the plant, or by introducing an epigenetic regulator-like protein-encoding RNA into a plant to temporarily reduce or silence the expression of a gene of interest. Methods of introducing recombinant proteins via viral infection or via the introduction of RNAs into plants are well known in the art. For example, Tobacco rattle virus (TRV) has been successfully used to introduce zinc finger nucleases in plants to cause genome modification (“Nontransgenic Genome Modification in Plant Cells”, Plant Physiology 154:1079-1087 (2010)).

[0520] A recombinant nucleic acid encoding an epigenetic regulator-like protein of the present disclosure can be expressed in a plant with any suitable plant expression vector. Typical vectors useful for expression of recombinant nucleic acids in higher plants are well known in the art and include, for example, vectors derived from the tumor-inducing (T1) plasmid of Agrobacterium tumefaciens (e.g., see Rogers et al., Meth. in Enzymol. (1987) 153:253-277). These vectors are plant integrating vectors in that on transformation, the vectors integrate a portion of vector DNA into the genome of the host plant. Exemplary A. tumefaciens vectors useful herein are plasmids pKYLX6 and pKYLX7 (e.g., see of Schardl et al., Gene (1987) 61:1-11; and Berger et al., Proc. Natl. Acad. Sci. USA (1989) 86:8402-8406); and plasmid pBI 101.2 that is available from Clontech Laboratories, Inc. (Palo Alto, Calif.).

[0521] In addition to regulatory domains, an epigenetic regulator-like protein of the present disclosure can be expressed as a fusion protein that is coupled to, for example, a maltose binding protein (“MBP”), glutathione S transferase (GST), hexahistidine, c-myc, or the FLAG epitope for ease of purification, monitoring expression, or monitoring cellular and subcellular localization.

[0522] Moreover, a recombinant nucleic acid encoding an epigenetic regulator-like protein of the present disclosure can be modified to improve expression of the recombinant protein in plants by using codon preference. When the recombinant nucleic acid is prepared or altered synthetically, advantage can be taken of known codon preferences of the intended plant host where the nucleic acid is to be expressed. For example, recombinant nucleic acids of the present disclosure can be modified to account for the specific codon preferences and GC content preferences of monocotyledons and dicotyledons, as these preferences have been shown to differ (Murray et al., Nucl. Acids Res. (1989) 17: 477-498).

[0523] In some embodiments, an epigenetic regulator-like protein of the present disclosure can be used to create functional “gene knockout” mutations in a plant by repression of the target gene expression. Repression may be of a structural gene, e.g., one encoding a protein having for example enzymatic activity, or of a regulatory gene, e.g., one encoding a protein that in turn regulates expression of a structural gene.

[0524] The present disclosure further provides expression vectors encoding an epigenetic regulator-like protein of the present disclosure (e.g. SHH1-like proteins, SHH2-like proteins, AGO4-like proteins, HDA6-like proteins, NRPD1-like proteins, NRPE1-like proteins, JMJ14-like proteins, RDR2-like proteins, NRPD2A/NRPE2-like proteins, NRPB3/NRPD3/NRPE3A-like proteins, NRPE3B-like proteins, NRPB11/NRPD11/NRPE1 l-like proteins, NRPB10/NRPD10/NRPE10-like proteins, NRPB2/NRPD12/NRPE12-like proteins, NRPB6A/NRPD6A/NRPE6A-like proteins, NRPB6B/NRPD6B/NRPE6B-like proteins, NRPB8A/NRPE8A-like proteins, NRPB8B/NRPD8B/NRPE8B-like proteins, NRPE5-like proteins, NRPD4/NRPE4-like proteins, NRPE7-like proteins, NRPD7-like proteins, NRPB5/NRPD5-like proteins, NRPB9A/NRPD9A/NRPE9A-like proteins, NRPB9B/NRPD9B/NRPE9B-like proteins, ATRX-like proteins, MOM1-like proteins, MORC1-like proteins, SssI-like proteins, DRM2-MTase-like proteins, DNMT3A-like proteins, DNMT3L-like proteins, MBD9-like proteins, SUVH2-like proteins, SUVH9-like proteins, DMS3-like proteins, MORC6-like proteins, SUVR2-like proteins, DRD1-like proteins, RDM1-like proteins, DRM3-like proteins, DRM2-like proteins, and/or FRG-like proteins). A nucleic acid sequence coding for the desired recombinant nucleic acid of the present disclosure can be used to construct a recombinant expression vector which can be introduced into the desired host cell. A recombinant expression vector will typically contain a nucleic acid encoding a recombinant protein of the present disclosure, operably linked to transcriptional initiation regulatory sequences which will direct the transcription of the nucleic acid in the intended host cell, such as tissues of a transformed plant.

[0525] For example, plant expression vectors may include (1) a cloned plant gene under the transcriptional control of 5′ and 3′ regulatory sequences and (2) a dominant selectable marker. Such plant expression vectors may also contain, if desired, a promoter regulatory region (e.g., one conferring inducible or constitutive, environmentally- or developmentally-regulated, or cell- or tissue-specific/selective expression), a transcription initiation start site, a ribosome binding site, an RNA processing signal, a transcription termination site, and/or a polyadenylation signal.

[0526] A plant promoter, or functional fragment thereof, can be employed to control the expression of a recombinant nucleic acid of the present disclosure in regenerated plants. The selection of the promoter used in expression vectors will determine the spatial and temporal expression pattern of the recombinant nucleic acid in the modified plant, e.g., the nucleic acid encoding the epigenetic regulator-like protein of the present disclosure is only expressed in the desired tissue or at a certain time in plant development or growth. Certain promoters will express recombinant nucleic acids in all plant tissues and are active under most environmental conditions and states of development or cell differentiation (i.e., constitutive promoters). Other promoters will express recombinant nucleic acids in specific cell types (such as leaf epidermal cells, mesophyll cells, root cortex cells) or in specific tissues or organs (roots, leaves or flowers, for example) and the selection will reflect the desired location of accumulation of the gene product. Alternatively, the selected promoter may drive expression of the recombinant nucleic acid under various inducing conditions.

[0527] Examples of suitable constitutive promoters may include, for example, the core promoter of the Rsyn7, the core CaMV 35S promoter (Odell et al., Nature (1985) 313:810-812), CaMV 19S (Lawton et al., 1987), rice actin (Wang et al., 1992; U.S. Pat. No. 5,641,876; and McElroy et al., Plant Cell (1985) 2:163-171); ubiquitin (Christensen et al., Plant Mol. Biol. (1989)12:619-632; and Christensen et al., Plant Mol. Biol. (1992) 18:675-689), pEMU (Last et al., Theor. Appl. Genet. (1991) 81:581-588), MAS (Velten et al., EMBO J. (1984) 3:2723-2730), nos (Ebert et al., 1987), Adh (Walker et al., 1987), the P- or 2′-promoter derived from T-DNA of Agrobacterium tumefaciens, the Smas promoter, the cinnamyl alcohol dehydrogenase promoter (U.S. Pat. No. 5,683,439), the Nos promoter, the pEmu promoter, the rubisco promoter, the GRP 1-8 promoter, and other transcription initiation regions from various plant genes known to those of skilled artisans, and constitutive promoters described in, for example, U.S. Pat. Nos. 5,608,149; 5,608,144; 5,604,121; 5,569,597; 5,466,785; 5,399,680; 5,268,463; and 5, 608,142.

[0528] Examples of suitable tissue specific promoters may include, for example, the lectin promoter (Vodkin et al., 1983; Lindstrom et al., 1990), the corn alcohol dehydrogenase 1 promoter (Vogel et al., 1989; Dennis et al., 1984), the corn light harvesting complex promoter (Simpson, 1986; Bansal et al., 1992), the corn heat shock protein promoter (Odell et al., Nature (1985) 313:810-812; Rochester et al., 1986), the pea small subunit RuBP carboxylase promoter (Poulsen et al., 1986; Cashmore et al., 1983), the Ti plasmid mannopine synthase promoter (Langridge et al., 1989), the Ti plasmid nopaline synthase promoter (Langridge et al., 1989), the petunia chalcone isomerase promoter (Van Tunen et al., 1988), the bean glycine rich protein 1 promoter (Keller et al., 1989), the truncated CaMV 35s promoter (Odell et al., Nature (1985) 313:810-812), the potato patatin promoter (Wenzler et al., 1989), the root cell promoter (Conkling et al., 1990), the maize zein promoter (Reina et al., 1990; Kriz et al., 1987; Wandelt and Feix, 1989; Langridge and Feix, 1983; Reina et al., 1990), the globulin-1 promoter (Belanger and Kriz et al., 1991), the c-tubulin promoter, the cab promoter (Sullivan et al., 1989), the PEPCase promoter (Hudspeth & Grula, 1989), the R gene complex-associated promoters (Chandler et al., 1989), and the chalcone synthase promoters (Franken et al., 1991).

[0529] Alternatively, the plant promoter can direct expression of a recombinant nucleic acid of the present disclosure in a specific tissue or may be otherwise under more precise environmental or developmental control. Such promoters are referred to here as “inducible” promoters. Environmental conditions that may affect transcription by inducible promoters include, for example, pathogen attack, anaerobic conditions, or the presence of light. Examples of inducible promoters include, for example, the AdhI promoter which is inducible by hypoxia or cold stress, the Hsp70 promoter which is inducible by heat stress, and the PPDK promoter which is inducible by light. Examples of promoters under developmental control include, for example, promoters that initiate transcription only, or preferentially, in certain tissues, such as leaves, roots, fruit, seeds, or flowers. An exemplary promoter is the anther specific promoter 5126 (U.S. Pat. Nos. 5,689,049 and 5,689,051). The operation of a promoter may also vary depending on its location in the genome. Thus, an inducible promoter may become fully or partially constitutive in certain locations.

[0530] Moreover, any combination of a constitutive or inducible promoter, and a non-tissue specific or tissue specific promoter may be used to control the expression of an epigenetic regulator-like protein of the present disclosure.

[0531] Both heterologous and endogenous promoters can be employed to direct expression of recombinant nucleic acids of the present disclosure. Accordingly, in certain embodiments, expression of a nucleic acid encoding an epigenetic regulator-like protein of the present disclosure is under the control of its respective endogenous promoter. In other embodiments, expression of a nucleic acid encoding an epigenetic regulator-like protein of the present disclosure is under the control of a heterologous promoter. Additionally, an endogenous gene encoding for an epigenetic regulator of the present disclosure (e.g. SHH1, SHH2, AGO4, HDA6, NRPD1, NRPE1, JMJ14, RDR2, NRPD2A/NRPE2, NRPB3/NRPD3/NRPE3A, NRPE3B, NRPB11/NRPD11/NRPE11, NRPB10/NRPD10/NRPE10, NRPB12/NRPD12/NRPE12, NRPB6A/NRPD6A/NRPE6A, NRPB6B/NRPD6B/NRPE6B, NRPB8A/NRPE8A, NRPB8B/NRPD8B/NRPE8B, NRPE5, NRPD4/NRPE4, NRPE7, NRPD7, NRPB5/NRPD5, NRPB9A/NRPD9A/NRPE9A, NRPB9B/NRPD9B/NRPE9B, ATRX, MOM1, MORC1, SssI, DRM2-MTase, DNMT3A, DNMT3L, MBD9, SUVH2, SUVH9, DMS3, MORC6, SUVR2, DRD1, RDM1, DRM3, DRM2, and/or FRG) can be modified using a knock-in approach, so that the modified gene will be under the control of its respective endogenous elements. Alternatively, a modified form of an entire epigenetic regulator genomic sequence may be introduced into a plant, so that the modified/recombinant gene will be under the control of its endogenous elements and the wild-type gene remains intact. Any or all of these techniques may also be combined to direct the expression of a recombinant nucleic acid of the present disclosure.

[0532] The recombinant nucleic acids of the present disclosure and/or a vector housing a recombinant nucleic acid of the present disclosure, may also contain a regulatory sequence that serves as a 3′ terminator sequence. One of skill in the art would readily recognize a variety of terminators that may be used in the recombinant nucleic acids of the present disclosure. For example, a recombinant nucleic acid of the present disclosure may contain a 3′ NOS terminator. Further, a native terminator from an epigenetic regulator of the present disclosure may also be used in the recombinant nucleic acids of the present disclosure.

[0533] Plant transformation protocols as well as protocols for introducing recombinant nucleic acids of the present disclosure into plants may vary depending on the type of plant or plant cell, e.g., monocot or dicot, targeted for transformation. Suitable methods of introducing recombinant nucleic acids of the present disclosure into plant cells and subsequent insertion into the plant genome include, for example, microinjection (Crossway et al., Biotechniques (1986) 4:320-334), electroporation (Riggs et al., Proc. Natl. Acad Sci. USA (1986) 83:5602-5606), Agrobacterium-mediated transformation (U.S. Pat. No. 5,563,055), direct gene transfer (Paszkowski et al., EMBO J. (1984) 3:2717-2722), and ballistic particle acceleration (U.S. Pat. No. 4,945,050; Tomes et al. (1995). “Direct DNA Transfer into Intact Plant Cells via Microprojectile Bombardment,” in Plant Cell, Tissue, and Organ Culture: Fundamental Methods, ed. Gamborg and Phillips (Springer-Verlag, Berlin); and McCabe et al., Biotechnology (1988) 6:923-926).

[0534] Additionally, an epigenetic regulator-like protein of the present disclosure can be targeted to a specific organelle within a plant cell. Targeting can be achieved by providing the recombinant protein with an appropriate targeting peptide sequence. Examples of such targeting peptides include, for example, secretory signal peptides (for secretion or cell wall or membrane targeting), plastid transit peptides, chloroplast transit peptides, mitochondrial target peptides, vacuole targeting peptides, nuclear targeting peptides, and the like (e.g., see Reiss et al., Mol. Gen. Genet. (1987) 209(1):116-121; Settles and Martienssen, Trends Cell Biol (1998) 12:494-501; Scott et al., J Biol Chem (2000) 10:1074; and Luque and Correas, J Cell Sci (2000) 113:2485-2495).

[0535] The modified plant may be grown into plants in accordance with conventional ways (e.g., see McCormick et al., Plant Cell. Reports (1986) 81-84.). These plants may then be grown, and pollinated with either the same transformed strain or different strains, with the resulting hybrid having the desired phenotypic characteristic. Two or more generations may be grown to ensure that the subject phenotypic characteristic is stably maintained and inherited and then seeds harvested to ensure the desired phenotype or other property has been achieved.

### Methods of Reducing Gene Expression in Plants

[0536] Growing conditions sufficient for the recombinant polypeptides of the present disclosure to be expressed in the plant to be targeted to and reduce the expression of one or more target nucleic acids of the present disclosure are well known in the art and include any suitable growing conditions disclosed herein. Typically, the plant is grown under conditions sufficient to express a recombinant polypeptide of the present disclosure (e.g. SHH1-like proteins, SHH2-like proteins, AGO4-like proteins, HDA6-like proteins, NRPD1-like proteins, NRPE1-like proteins, JMJ14-like proteins, RDR2-like proteins, NRPD2A/NRPE2-like proteins, NRPB3/NRPD3/NRPE3A-like proteins, NRPE3B-like proteins, NRPB11/NRPD11/NRPE11-like proteins, NRPB0/NRPD10/NRPE10-like proteins, NRPB12/NRPD12/NRPE12-like proteins, NRPB6A/NRPD6A/NRPE6A-like proteins, NRPB6B/NRPD6B/NRPE6B-like proteins, NRPB8A/NRPE8A-like proteins, NRPB8B/NRPD8B/NRPE8B-like proteins, NRPE5-like proteins, NRPD4/NRPE4-like proteins, NRPE7-like proteins, NRPD7-like proteins, NRPB5/NRPD5-like proteins, NRPB9A/NRPD9A/NRPE9A-like proteins, NRPB9B/NRPD9B/NRPE9B-like proteins, ATRX-like proteins, MOM1-like proteins, MORC1-like proteins, SssI-like proteins, DRM2-MTase-like proteins, DNMT3A-like proteins, DNMT3L-like proteins, MBD9-like proteins, SUVH2-like proteins, SUVH9-like proteins, DMS3-like proteins, MORC6-like proteins, SUVR2-like proteins, DRD1-like proteins, RDM1-like proteins, DRM3-like proteins, DRM2-like proteins, and/or FRG-like proteins), and for the expressed recombinant polypeptide to be localized to the nucleus of cells of the plant in order to be targeted to and reduce the expression of the target nucleic acids. Generally, the conditions sufficient for the expression of the recombinant polypeptide will depend on the promoter used to control the expression of the recombinant polypeptide. For example, if an inducible promoter is utilized, expression of the recombinant polypeptide in a plant will require that the plant to be grown in the presence of the inducer.

[0537] As noted above, growing conditions sufficient for the recombinant polypeptides of the present disclosure to be expressed in the plant to be targeted to and reduce the expression of one or more target nucleic acids may vary depending on a number of factors (e.g. species of plant, use of inducible promoter, etc.). Suitable growing conditions may include, for example, ambient environmental conditions, standard greenhouse conditions, growth in long days under standard environmental conditions (e.g. 16 hours of light, 8 hours of dark), growth in 12 hour light: 12 hour dark day/night cycles, etc.

[0538] Various time frames may be used to observe reduction in expression and/or targeted methylation of a target nucleic acid according to the methods of the present disclosure. Plants may be observed/assayed for reduction in expression and/or targeted methylation of a target nucleic acid after, for example, about 5 days of growth, about 10 days of growth, about 15 days after growth, about 20 days after growth, about 25 days after growth, about 30 days after growth, about 35 days after growth, about 40 days after growth, about 50 days after growth, or 55 days or more of growth.

[0539] Silencing induced by targeting various recombinant proteins of the present disclosure such as, for example, SHH1-like proteins, SHH2-like proteins, AGO4-like proteins, HDA6-like proteins, NRPD1-like proteins, NRPE1-like proteins, JMJ14-like proteins, RDR2-like proteins, NRPD2A/NRPE2-like proteins, NRPB3/NRPD3/NRPE3A-like proteins, NRPE3B-like proteins, NRPB1/NRPD11/NRPE1 l-like proteins, NRPB10/NRPD10/NRPE10-like proteins, NRPB12/NRPD12/NRPE12-like proteins, NRPB6A/NRPD6A/NRPE6A-like proteins, NRPB6B/NRPD6B/NRPE6B-like proteins, NRPB8A/NRPE8A-like proteins, NRPB8B/NRPD8B/NRPE8B-like proteins, NRPE5-like proteins, NRPD4/NRPE4-like proteins, NRPE7-like proteins, NRPD7-like proteins, NRPB5/NRPD5-like proteins, NRPB9A/NRPD9A/NRPE9A-like proteins, NRPB9B/NRPD9B/NRPE9B-like proteins, ATRX-like proteins, MOM1-like proteins, MORC1-like proteins, SssI-like proteins, DRM2-MTase-like proteins, DNMT3A-like proteins, DNMT3L-like proteins, MBD9-like proteins, SUVH2-like proteins, SUVH9-like proteins, DMS3-like proteins, MORC6-like proteins, SUVR2-like proteins, DRD1-like proteins, RDM1-like proteins, DRM3-like proteins, DRM2-like proteins, and/or FRG-like proteins, can be stable in plants even in the absence of these recombinant proteins. Accordingly, the methods of the present disclosure may allow one or more target nucleic acids in a plant to remain silenced after the recombinant polynucleotides and/or recombinant polypeptides of the present disclosure encoding epigenetic regulator-like proteins have been crossed out of the plant. For example, after targeting a particular genomic region with a recombinant protein according to the methods of the present disclosure, the silencing and DNA methylation of the targeted region may remain stable even after crossing away the transgenes or after the recombinant polypeptide is otherwise removed from the plant. It is an object of the present disclosure to provide plants having reduced expression of one or more target nucleic acids according to the methods of the present disclosure. As the methods of the present disclosure may allow one or more target nucleic acids in a plant to remain silenced after the recombinant polynucleotides of the present disclosure have been crossed out of the plant or the recombinant polypeptides are otherwise removed from the plant, the progeny plants of these plants may have reduced expression of one or more target nucleic acids even in the absence of the recombinant polypeptides or the recombinant polynucleotides that produce the recombinant polypeptides of the present disclosure.

[0540] A target nucleic acid of the present disclosure in a plant cell housing an epigenetic-regulator like protein of the present disclosure may have its level of methylation increased by at least about 5%, at least about 10%, at least about 15%, at least about 20%, at least about 25%, at least about 30%, at least about 40%, at least about 50%, at least about 55%, at least about 60%, at least about 65%, at least about 70%, at least about 75%, at least about 80%, at least about 85%, at least about 90%, at least about 91%, at least about 92%, at least about 93%, at least about 94%, at least about 95%, at least about 96%, at least about 97%, at least about 98%, at least about 99%, or at least about 100% as compared to a corresponding control. Various controls will be readily apparent to one of skill in the art. For example, a control may be a corresponding plant or plant cell that does not contain a nucleic acid encoding an epigenetic regulator-like protein of the present disclosure.

[0541] A target nucleic acid of the present disclosure having increased methylation as compared to a corresponding control nucleic acid may exhibit an increase in methylation over a number of nucleotides including and adjacent to the targeted nucleotide sequences in a target nucleic acid. For example, the increase in methylation may be present over one nucleotide, over about 5 nucleotides, over about 10 nucleotides, over about 15 nucleotides, over about 20 nucleotides, over about 25 nucleotides, over about 30 nucleotides, over about 35 nucleotides, over about 40 nucleotides, over about 45 nucleotides, over about 50 nucleotides, over about 55 nucleotides, over about 60 nucleotides, over about 75 nucleotides, over about 100 nucleotides, over about 125 nucleotides, over about 150 nucleotides, over about 175 nucleotides, over about 200 nucleotides, over about 225 nucleotides, over about 250 nucleotides, over about 275 nucleotides, over about 300 nucleotides, over about 350 nucleotides, over about 400 nucleotides, over about 450 nucleotides, over about 500 nucleotides, over about 600 nucleotides, over about 700 nucleotides, over about 800 nucleotides, over about 900 nucleotides, over about 1,000 nucleotides, over about 1,500 nucleotides, over about 2,000 nucleotides, over about 2,500 nucleotides, or over about 3,000 nucleotides or more as compared to corresponding nucleotides in a corresponding control nucleic acid. The increase in methylation of nucleotides adjacent to the target nucleotides in the target nucleic acid may occur in nucleotides that are 5′ to the target nucleotide sequences, 3′ to the target nucleotides sequences, or both 5′ and 3′ to the target nucleotide sequences.

[0542] A target nucleic acid of the present disclosure in a plant cell housing an epigenetic-regulator like protein of the present disclosure may have its expression reduced by at least about 5%, at least about 10%, at least about 15%, at least about 20%, at least about 25%, at least about 30%, at least about 40%, at least about 50%, at least about 55%, at least about 60%, at least about 65%, at least about 70%, at least about 75%, at least about 80%, at least about 85%, at least about 90%, at least about 91%, at least about 92%, at least about 93%, at least about 94%, at least about 95%, at least about 96%, at least about 97%, at least about 98%, at least about 99%, or at least about 100% as compared to a corresponding control. Various controls will be readily apparent to one of skill in the art. For example, a control may be a corresponding plant or plant cell that does not contain a nucleic acid encoding an epigenetic regulator-like protein of the present disclosure.

[0543] It is to be understood that while the present disclosure has been described in conjunction with the preferred specific embodiments thereof, the foregoing description is intended to illustrate and not limit the scope of the present disclosure. Other aspects, advantages, and modifications within the scope of the present disclosure will be apparent to those skilled in the art to which the present disclosure pertains.

### EXAMPLES

[0544] The following examples are offered to illustrate provided embodiments and are not intended to limit the scope of the present disclosure.

### Example 1: DNA-Binding Domain-Targeting of Epigenetic Regulators to the FWA Locus

[0545] This Example demonstrates the targeting of different epigenetic regulators/components of the RNA-directed DNA methylation pathway to recruit Pol IV and/or Pol V to specific loci.

### INTRODUCTION

[0546] The RNA-directed DNA methylation (RdDM) pathway mediates de novo DNA methylation in plants. Applicants have previously demonstrated the use of ZF-SUVH2 to specifically target methylation and silencing of a target locus. SUVH2 is an epigenetic regulator and is involved in the RNA-directed DNA methylation pathway. This result was achieved by utilizing the FWA gene as a target. Expression of FWA causes a strong late-flowering phenotype in Arabidopsis. Methylation at the promoter of this gene, as is present in wild-type plants, causes transcriptional silencing of FWA and results in an early-flowering phenotype relative to fwa-4 mutants. The fwa-4 Arabidopsis epigenetic mutant shows no methylation in the promoter of the FWA gene and thus shows the characteristic late-flowering phenotype (relative to wild type). Applicants constructed a chimeric SUVH2 protein fused to a Zinc Finger (ZF) protein designed to target the promoter of FWA in Arabidopsis, ZF108, and demonstrates that this fusion protein can promote methylation at this genomic site in fwa-4 plants (See WO/2014/134567). This methylation targeting is accompanied by the recruitment of Pol V to this (FWA) site and results in the production of the non-coding RNA needed to trigger methylation, gene silencing, and therefore produce an early-flowering phenotype.

[0547] In this Example, Applicants explored whether other epigenetic regulators could be targeted to a specific locus and induce silencing, using the FWA gene as a target locus.

### Materials and Methods

[0548] Plasmid Construction

[0549] In order to create the different fusion proteins described in this example, the ZF108 fragment in the pUC57 plasmid was digested with the restriction enzyme XhoI and inserted directly into the unique XhoI site in different genes or inserted into the unique XhoI of a set of modified pCR2 plasmids containing either BLRP_3×Flag, 3×Flag_BLRP, BLRP_3×HA or 3×HA_BLRP tags, where the XhoI unique restriction site is located between the BLRP sequence and the Flag or HA tag, no matter whether Flag or HA tags are in 5′ or 3′ position with respect to the BLRP sequence. ZF108 contains 6 Zn fingers and was designed as described in Segal et al (Segal et al., 2003). ZF108 is designed to target the promoter of FWA in Arabidopsis thaliana. The sequence of ZF108 is presented in SEQ ID NO: 393. Most of the epigenetic regulator proteins described in this Example were from A. thaliana. In addition, the catalytic domain of DRM2 from Nicotiana tabacum was utilized because this domain was successfully crystalized (Cell, 157: 1050-1060). In addition, the SssI DNA methyltransferase from the bacteria Spiroplasma sp. was utilized (Nucleic Acids Research, 22:5354-5359).

[0550] NRPD1-3×Flag-ZF:

[0551] For this purpose, the plasmid pENTR-NRPD1 (Law et al, 2011) was used that contains a genomic sequence of NRPD1 including 1450 base pairs of 5′ promoter sequence. The 3×Flag-ZF108-BLRP fusion in the pCR2 plasmid was then digested with AscI and inserted by InFusion (Clontech) in the single AscI site of a pENTR-NRPD1 plasmid, located 6 base pairs after the end of the coding sequence of NRPD1.

[0552] NRPD2-3×Flag-ZF:

[0553] For this purpose, the plasmid pDONR-NRPD2 (Haag, J R et al, 2009) was used that contains a genomic sequence of NRPD2 including 1300 base pairs of 5′ promoter sequence. The NRPD2 sequence was introduced into the vector JP726 by LR reaction (Invitrogen) and the 3×Flag-ZF108-BLRP fusion was cloned into the unique PacI restriction site located 50 bp downstream of the end of the NRPD2 sequence.

[0554] RDR2-3×Flag-ZF:

[0555] For this purpose, the plasmid pENTR-RDR2 (Law et al, 2011) was used that contains a genomic sequence of RDR2 including 300 base pairs of 5′ promoter sequence. The 3×Flag-ZF108-BLRP fusion in the pCR2 plasmid was inserted in the single AscI site of a pENTR-RDR2 plasmid by InFusion (Clontech), located 6 base pairs after the end of the coding sequence of RDR2.

[0556] SHH1-3×Myc-ZF:

[0557] For this purpose, the plasmid pENTR-SHH1 (Law et al, 2011) was used that contains a genomic sequence of SHH1 including 1400 base pairs of 5′ promoter sequence. A3×Myc-ZF108-BLRP fusion in the pCR2 plasmid was then inserted in the single AscI site of a pENTR-SHH1 plasmid by InFusion (Clontech), located 6 base pairs after the end of the coding sequence of SHH1. In this particular construction, a shorter ZF108 sequence with only five tandem copies of the Zn Finger repeats was cloned instead of the six tandem copies present in ZF108.

[0558] HDA6_3×Flag_ZF:

[0559] For this purpose, the plasmid pEG302-HDA6 was used that contains a genomic sequence of HDA6 including 700 base pairs of 5′ promoter sequence. The 3×Flag-ZF108-BLRP fusion in the pCR2 plasmid was then digested with AscI and inserted by InFusion (Clontech) in the single AscI site of a pEG302-HDA6 plasmid, located 6 base pairs after the end of the coding sequence of HDA6.

[0560] ZF-3×Flag-AGO4:

[0561] For this purpose, the plasmid pCAMBIA1300a-AGO4 (Li et al, 2006) was used that contains a genomic sequence of AGO4 including 3700 base pairs of 5′ promoter sequence. The BLRP-ZF108-3×Flag fusion in the pCR2 plasmid was then digested with ApaI/BamHI and inserted in the single ApaI/BamHI sites of a pCAMBIA1300a-AGO4 plasmid, located right upstream of the coding sequence of AGO4.

[0562] JMJ14-3×Flag-ZF:

[0563] For this purpose, the plasmid pEG302-JMJ14 (Deleris et al, 2010) was used that contains a genomic sequence of JMJ14 including 1600 base pairs of 5′ promoter sequence. The 3×Flag-ZF108-BLRP fusion in the pCR2 plasmid was then digested with AscI and inserted by InFusion (Clontech) in the single AscI sites of a pEG302-JMJ14 plasmid, located 6 base pairs after the end of the coding sequence of JMJ14.

[0564] SHH2_3×FlagZF:

[0565] For this purpose, a genomic fragment of SHH2 containing 1294 bp of 5′promoter was cloned into pENTR/D (Invitrogen). The 3×Flag-ZF108-BLRP fusion in the pCR2 plasmid was then digested with AscI and inserted by InFusion (Clontech) in the single AscI site of a pENTR-SHH2 plasmid, located 6 base pairs after the end of the coding sequence of SHH2.

[0566] ZF_3×Flag_DMS3:

[0567] For this purpose, a modified pMDC123 plasmid (Curtis et al, 2003, Plant Phys) was created first, containing 1990 bp of the promoter region of Arabidopis UBQ10 gene upstream of the BLRP_ZF108_3×Flag cassette present in one of the modified pCR2 plasmids described above. Both UBQ10 promoter and BLRP_ZF108_3×Flag are upstream of the gateway cassette (Invitrogen) present in the original pMDC123 plasmid. A cDNA sequence of DMS3 was cloned first into pENTR/D plasmid (Invitrogen) and then delivered into the modified pMDC123 by LR reaction (Invitrogen), creating an in-frame fusion of DMS3 cDNA with the upstream BLRP_ZF_3×Flag cassette.

[0568] pUBQ10::ZF_3×Flag_M.SssI.

[0569] For this purpose, a modified pMDC123 plasmid (Curtis et al, 2003, Plant Phys) was created first, containing 1990 bp of the promoter region of Arabidopsis UBQ10 gene upstream of the BLRP_ZF108_3×Flag cassette present in one of the modified pCR2 plasmids described above. Both UBQ10 promoter and BLRP_ZF108_3×Flag are upstream of the gateway cassette (Invitrogen) present in the original pMDC123 plasmid. A plant codon-optimized cDNA sequence of the Methyltransferase gene from Spiroplasma sp. strain MQ1 (M.SssI) was cloned first into pENTR/D plasmid (Invitrogen) and then delivered into the modified pMDC123 by LR reaction (Invitrogen), creating an in-frame fusion of M.SssI cDNA with the upstream BLRP ZF_3×Flag cassette. The nucleotide sequence of plant codon-optimized M.SssI in pUBQ10::ZF_3×Flag_M.SssI is set forth as SEQ ID NO: 661.

[0570] pUBQ10::ZF_3×Flag_NtDRM2_Mtase.

[0571] For this purpose, a modified pMDC123 plasmid (Curtis et al, 2003, Plant Phys) was created first, containing 1990 bp of the promoter region of Arabidopsis UBQ10 gene upstream of the BLRP_ZF108_3×Flag cassette present in one of the modified pCR2 plasmids described above. Both UBQ10 promoter and BLRP_ZF108_3×Flag are upstream of the gateway cassette (Invitrogen) present in the original pMDC123 plasmid. A cDNA sequence of Nicotiana tabacum DRM2 methyltransferase domain (NtDRM2_Mtase) was cloned first into pENTR/D plasmid (Invitrogen) and then delivered into the modified pMDC123 by LR reaction (Invitrogen), creating an in-frame fusion of NtDRM2_Mtase cDNA with the upstream BLRP_ZF_3×Flag cassette. The nucleotide sequence of NtDRM2_Mtase in pUBQ10::ZF_3×Flag_NtDRM2_Mtase is set forth as SEQ ID NO: 670.

[0572] ZF-3×HA-SUVH9:

[0573] For this purpose, the plasmid pENTR-3×HA-SUVH9 (Johnson, L et al, 2008, PLoS Genet. 2008 November; 4 (11):e1000280) was used that contains a genomic sequence of SUVH9 including 1400 base pairs of 5′ promoter sequence and a BLRP-3×HA epitope upstream of the start codon. The ZF108 in the pCR2 plasmid was then amplified and cloned into the unique XhoI site of pENTR-3×HA-SUVH9 plasmid. by InFusion (Clontech) creating the pENTR-BLRP-ZF108-3×HA-SUVH9 plasmid.

[0574] Plant Transformation

[0575] All ZF-108 fusion protein constructs cloned in a pENTR plasmid (see above) were recombined into the binary vector pEG302-JP726 by LR reaction (Invitrogen) except for ZF_3×Flag_DMS3, pUBQ10::ZF_3×Flag_M.SssI, pUBQ10::ZF_3×Flag_NtDRM2_Mtase that were cloned in pDMC123 and ZF-3×Flag-AGO4 that was cloned in pCAMBIA1300a. All constructs were introduced into fwa-4 plants using Agrobacterium-mediated transformation. Transformed lines were selected using BASTA, except for ZF-3×Flag-AGO4 where Hygromycin selection was done.

[0576] Flowering Time Measurements

[0577] Flowering time was measured by counting the total number of leaves (rossette and cauline) of each individual plant.

[0578] Bisulfite Sequencing and Data Analysis

[0579] Bisulfite sequencing followed by PCR amplification and cloning of FWA fragments was done using EZ DNA Methylation-Gold kit (Zymo Research) as performed in Johnson et al. (2008). BS-Seq libraries were generated as previously reported (Cokus et al., 2008) and all libraries were sequenced using the HiSeq 2000 platform following manufacturer instructions (Illumina) at a length of 50 bp. Bisulfite-Seq (BS-Seq) reads were aligned to the TAIR10 version of the Arabidopsis thaliana reference genome using BS-seeker. For BS-Seq up to 2 mismatches were allowed and only uniquely mapped reads were used.

[0580] Results

[0581] To explore whether various other RdDM proteins have the ability to trigger de novo DNA methylation at the FWA locus, or otherwise silence this locus, in the fwa-4 mutant, a series of experiments were conducted in an attempt to target different components of the RdDM pathway to the promoter of the FWA gene in Arabidopsis. Various proteins involved in RdDM were selected and were fused to the ZF108 zinc finger, which targets the FWA promoter (see Materials and Methods), and transformed into the fwa-4 mutant. ZF-targeting lines were constructed as described above. The flowering time of independent transgenic lines was scored. The list of the different RdDM components chosen and the flowering time results are shown below in Table 1A.

TABLE 1A
Early flowering in T1 lines compared to fwa-4

| | early | late | % early |
|---|---|---|---|
| SHH1_ZF | 13 | 35 | 27 |
| SHH2_ZF | 4 | 15 | 21 |
| ZF_AGO4 | 12 | 55 | 18 |
| HDA6_ZF | 3 | 5 | 38 |
| NRPD1 _ZF | 4 | 13 | 24 |
| JMJ14_ZF | 3 | 9 | 25 |
| RDR2_ZF | 9 | 44 | 14 |
| NRPD2a_ZF | 4 | 24 | 14 |
| ZF_M.SssI | 12 | 16 | 42 |
| ZF_Mtase | 18 | 31 | 37 |
| ZF_SUVH9 | 3 | 6 | 33 |
| ZF | 0 | 49 | 0 |
| 2xZF | 0 | 11 | 0 |
| YPET_ZF | 0 | 40 | 0 |
| YPET2x_ZF | 0 | 23 | 0 |

[0582] The results presented in Table 1A demonstrate that various epigenetic regulators fused to a zinc finger that targets the FWA locus can efficiently promote early flowering in an fwa-4 mutant background. Different proteins also demonstrated a range of ability to induce FWA silencing. HDA6_ZF had one of the highest silencing efficiencies (38%).

[0583] In order to analyze whether the early flowering phenotype of the early-flowering lines described in Table 1A was due to the methylation of the FWA promoter, a whole-genome bisulfite sequencing assay was performed in two independent NRPD1-ZF lines that showed the early flowering phenotype relative to fwa-4. Bisulfite sequencing experiments were conducted as described above. The results, which are presented in FIG. 5, show that DNA methylation was re-established at FWA in the NRPD1-ZF lines. Thus, NRPD1 was effective in targeting methylation at the FWA promoter. Similar bisulfite sequencing results with other epigenetic regulator-ZF transgenic lines are presented in FIG. 6. These results suggest that the other epigenetic regulators described above where early flowering was observed may also be targeting DNA methylation to FWA. Regardless of the mechanism, the early flowering phenotypes observed in transgenic fwa-4 plants is evidence that FWA was silenced.

[0584] Applicants have shown that different RdDM proteins can be targeted to silence specific loci with varying degrees of silencing efficiency. There may be some advantage to having a set of proteins that can provide a range of different efficiencies of gene silencing. For example, depending on the target nucleic acid to be silenced, it may be advantageous to select recombinant proteins of the present disclosure having different silencing efficiencies. For example, it may be an advantage to fully silence the expression of a target gene by selecting a very efficient RdDM component to direct as much methylation as possible to the target gene. In other cases, it might be an advantage to target a less efficient RdDM component to target less methylation to a gene to cause only a partial silencing effect. Genes often show different effects on plant phenotype when they are expressed at different levels, and there are likely to be situations where partial silencing of a plant gene is most advantageous.

### Example 2: CRISPR-Targeting of Epigenetic Regulators to Specific Loci

[0585] This Example describes exemplary experimental guidelines for constructing fusion constructs containing epigenetic regulators as disclosed herein fused to dCAS9 proteins. These constructs may be used to target an epigenetic regulator to a specific locus of a genome using the CRISPR-CAS9 system.

[0586] To test whether epigenetic regulators as described herein may be targeted to a target nucleic acid using a CRISPR-CAS9 system, a series of different fusion constructs will be prepared. As the specific position of the epigenetic regulator in the fusion protein may impact function, different constructs will be prepared such that the epigenetic regulator is oriented either N-terminal or C-terminal to the position of the dCAS9 protein in the fusion protein. Different promoters will also be tested to evaluate whether certain promoters produce optimal expression levels of the fusion proteins, such as using constitutive promoters. Further, in order to ensure optimal functioning of both the dCAS9 protein and the epigenetic regulator, different linkers with different properties will be evaluated in these fusion proteins.

### Materials and Methods

[0587] Cloning of Fusion Proteins and gRNA-fwa

[0588] Exemplary structures of these fusion constructs to be used in the CRISPR-CAS9 system are presented in FIG. 7A, FIG. 7B, FIG. 8A, and FIG. 8B. In these figures, different regions of the construct are numerically labeled, with each region representing a respective module of the construct. Fusion constructs containing different variants of the modules presented in these figures will also be prepared, as described below in Table 2A.

TABLE 2A
Exemplary Parameters for Fusion Construct Modules

| | | Template |
|---|---|---|
| Module | Variants | DNA |
| 1 | pUBI10, pTPL, p35S, endogenous | genomic DNA |
| 2 | dCas9-1xHA-7N-NLS | m6UC |
| 3 | Flexible (SGGGSGGGGSGGGGS (SEQ ID NO: 865), | synthetic |
| | GSSGSNGPGGSGGGGSGG (SEQ ID NO: 866), SSGPPPGTG | oligo |
| | (SEQ ID NO: 867)). | |
| | Rigid (AEAAAKEAAAKA (SEQ ID NO: 868)). | |
| | XTEN (SGSETPGTSESATPES (SEQ ID NO: 869)) | |
| | 3xFlag | |
| 4 | Epigenetic regulator such as e.g. SUVH2, SUVH9, DMS3, | cDNA |
| | MORC6, SUVR2, DRD1, RDM1, DRM3, DRM2, FRG1, FRG2, | |
| | SHH1, SHH2, AGO4, HDA6, NRPD1, JMJ14, RDR2, NRPE1, | |
| | NRPD2A/NRPE2, NRPB3/NRPD3/NRPE3A, NRPE3B, | |
| | NRPB11/NRPD11/NRPE11, NRPB10/NRPD10/NRPE10, | |
| | NRPB12/NRPD12/NRPE12, NRPB6A/NRPD6A/NRPE6A, | |
| | NRPB6B/NRPD6B/NRPE6B, NRPB8A/NRPE8A, | |
| | NRPB8B/NRPD8B/NRPE8B, NRPE5, NRPD4/NRPE4, | |
| | NRPE7, NRPD7, NRPB5/NRPD5, | |
| | NRPB9A/NRPD9A/NRPE9A, NRPB9B/NRPD9B/NRPE9B, | |
| | SssI_Mtase, NtDRM2_Mtase, ATRX, MOM1, MORC1, | |
| | DNMT3A, DNMT3L. | |
| 5 | NOS terminator | m6UC |
| 6 | TBS Insulator | m6UC |
| 7 | gRNAs with different target sequences | gRNA |

[0589] Exemplary Construct Design

[0590] To provide an example, to construct the gRNAs targeting the FWA locus, the binary vector pJRH0646 that contains a plant codon-optimized dCAS9 (pdCAS9) driven by the 35S promoter and fused to a 3×Flag tag at the C-terminus will be used. To construct the dCAS9-epigenetic regulator fusion, a pENTR_D (Invitrogen) plasmid that contains a cDNA fragment of epigenetic regulator (pENTR_epigenetic regulator) will be used to amplify the epigenetic regulator cDNA, which will be cloned into the pJRH0646 plasmid using appropriate restriction enzymes, immediately after the 3×Flag tag (pJRH0646_35S_pdCAS9_3×Flag_epigenetic regulator). This creates a fusion with pdCAS9 at the N terminus of epigenetic regulator and uses a method similar to the method described in (Gilbert et al., 2013). Features of pJRH0646_35S_pdCAS9_3×Flag_epigenetic regulator include a 35S promoter (SEQ ID NO: 394), NLS_pdCas9_NLS (SEQ ID NO: 395), flexible linker (SEQ ID NO: 396), 3×FLAG Tag (SEQ ID NO: 397), U6 promoter driving expression of gRNA (SEQ ID NO: 398), gRNA-FWA sequence (SEQ ID NO: 399), and the gRNA backbone including the tracrRNA and the gRNA terminator (SEQ ID NO: 400).

[0591] All the different modules will be amplified by PCR using specific oligos and cloned into a binary plasmid using InFusion (Clontech)

[0592] In order to change the target sequence present in the different gRNAs, the protocol described in Li et al., 2013 will be followed using the plasmid gRNA-m6UC. As an example, to generate the gRNAFWA-8 that targets the sequence “gggtttttgcttttcgccat” in the FWA promoter, two consecutive PCRs using the plasmid pUC-gRNA as a template and the oligos 12063(GGAAGCTTAGGCCTT AGAAATCTCAAAATTCCGGC (SEQ ID NO: 870)), 12228 (atggcgaaaagcaaaaacccAATCACTACTTCGTCTCT (SEQ ID NO: 871)) for PCR1 and 12229 (gggtttttgcttttcgccatGTTTTAGAGCTAGAAATAGC (SEQ ID NO: 872)), 12064 (GGCAACGCGTrCTAGTAATGCCAACTTTGTACA (SEQ ID NO: 873)) for PCR2 will be performed.

[0593] Alternatively, a tRNA-gRNA expression cassette (Xie, X et al, 2015, Proc Natl Acad Sci USA. 2015 Mar. 17; 112(11):3570-5) will be used to deliver multiple gRNAs simultaneously with high expression level. Due to the repetitive nature of these modules, gene synthesis, instead or traditional cloning, will be used to generate the cassettes.

[0594] To target the FWA locus, various alternative gRNA sequences described will be tested, as presented in Table 2B.

TABLE 2B
gRNA Molecules Targeting the FWA Promoter

| | crRNA Sequence |
|---|---|
| gRNA Name | (5′ → 3′) |
| gRNA3 | ATTCTCGACGGAAAGATGTA |
| | (SEQ ID NO: 874) |
| gRNA4 | ACGGAAAGATGTATGGGCTT |
| | (SEQ ID NO: 875) |
| gRNA14 | CCATTGGTCCAAGTGCTATT |
| | (SEQ ID NO: 876) |
| gRNA16 | GCGGCGCAAGATCTGATATT |
| | (SEQ ID NO: 877) |
| gRNA17 | AAAACTAGGCCATCCATGGA |
| | (SEQ ID NO: 878) |

[0595] Various other loci in the genome will also be targeted to demonstrate the ability of the fusion protein to target a locus of interest. Exemplary loci that will be targeted include GA1, FLC, and RITA. A series of different gRNA molecules will be designed that target these loci. The crRNA portion of these gRNAs are presented below in Table 2C. The gRNA is a fusion of the crRNA and tracrRNA.

TABLE 2C
gRNA Molecules Targeting GA1, FLC, or RITA

| | | crRNA Sequence |
|---|---|---|
| Locus | gRNA Name | (5′ → 3′) |
| GA1 | gRNAGA13 | GACACACACATACACATACG |
| | | (SEQ ID NO: 879) |
| | gRNAGA14 | GCCCTTCAATTCCGTAGCTT |
| | | (SEQ ID NO: 880) |
| | gRNAGA15 | GGTGGGATCTTCCAAAGCTA |
| | | (SEQ ID NO: 881) |
| | gRNAGA16 | GGAGAGAAGGATATGATGCA |
| | | (SEQ ID NO: 882) |
| | gRNAGA17 | GACAATCTCTGATGTGAAGT |
| | | (SEQ ID NO: 883) |
| FLC | gRNAFLC1 | GTACTATGTAGGCACGACTT |
| | | (SEQ ID NO: 884) |
| | gRNAFLC2 | GTCAATCCGTATCGTAGGGG |
| | | (SEQ ID NO: 885) |
| | gRNAFLC3 | GAGCAAAGACGCTCGTCATG |
| | | (SEQ ID NO: 886) |
| | gRNAFLC4 | GGCTCGTCATGCGGTACACG |
| | | (SEQ ID NO: 887) |
| | 8RNAFLC5 | GCGACTTGAACCCAAACCTG |
| | | (SEQ ID NO: 888) |
| RITA | gRNARITA1 | GTTCTCGATGTAGTCAGTGG |
| | | (SEQ ID NO: 889) |
| | gRNARITA2 | GGGTGGAGCCTCCCTGGAGA |
| | | (SEQ ID NO: 890) |
| | gRNARITA3 | GATCAGCTCTGAAGCGGTGA |
| | | (SEQ ID NO: 891) |
| | gRNARITA4 | GATGGTGTCTCCTCTCTGAA |
| | | (SEQ ID NO: 892) |

[0596] Transformation of fwa-4 Plants

[0597] Agrobacterium AGL0 cells will be transformed with the final binary vector containing the fusion proteins and the gRNA. Arabidopsis fwa-4 plants will be transformed using floral dip methods well-known in the art.

[0598] Flowering Time Measurements

[0599] Progeny of transformed plants (T1s) will be planted and screened for glufosinate-resistant plants that incorporate the T-DNA into the Arabidopsis genome, which confers resistance to glufosinate. Among the glufosinate-resistant transgenic plants, flowering time will be measured and compared to early-flowering wild-type Col0 and late-flowering fwa-4 plants. Flowering time will be measured by counting the total number of leaves (rossette and cauline) of each individual plant.

[0600] Data Analysis

[0601] Plants transformed with the fusion constructs described above will be evaluated for phenotypic differences as compared to corresponding control plants (e.g. wild-type plants) which are suggestive of successful fusion protein targeting to the locus of interest and subsequent silencing at the locus. The phenotype evaluated may vary depending on the locus targeted.

[0602] Other analyses to be performed may include measuring the expression level of the targeted locus in the transformed plants, measuring the degree of DNA methylation at the targeted locus in the transformed plants, or other assays well-known to those of skill in the art.

[0603] It is thought that the fusion proteins containing an epigenetic regulator as described herein and a dCAS9 protein will be able to successfully target a locus of interest and induce epigenetic silencing.

### Example 3: Modified CRISPR-Targeting of Epigenetic Regulators to Specific Loci Using MS2 Coat Proteins

[0604] This Example describes exemplary experimental guidelines for constructing recombinant constructs for use in a modified CRISPR-targeting scheme involving epigenetic regulators as disclosed herein, dCAS9 proteins, and MS2 coat proteins. These constructs may be used to target an epigenetic regulator to a specific locus of a genome using the CRISPR-CAS9 system.

[0605] Example 2 describes the recombinant fusing of epigenetic regulator proteins to a dCAS9 protein to target these epigenetic regulators to the e.g. FWA locus. However, it is possible that in some instances, the fusion between the epigenetic regulator and the dCAS9 protein may impact the function of the epigenetic regulator, the dCAS9 protein, or both the epigenetic regulator and the dCAS9 protein. One way to circumvent this potential issue is to use other methods of CRISPR-targeting the epigenetic regulator to the locus of interest other than by fusing the epigenetic regulator to the dCAS9 protein.

[0606] One such method involves adding a small RNA sequence that binds to a specific protein which can then be fused to the epigenetic regulator. Recently, work by Konermann et al. 2014 showed that two loops in the gRNA backbone (tetraloop and stem 2) can be modified without negative effects on gRNA-CAS9 activity. They added to these loops a hairpin aptamer that selectively binds dimerized MS2 bacteriophage coat proteins and showed that MS2-mediated recruitment of the transcriptional activator VP64 to the gRNA-CAS9 complex was able to induce expression of a target gene.

[0607] A similar technique will be used herein to bypass the possible negative effect that an epigenetic regulator or the CAS9 protein may have on each other's activity when expressed as a fusion protein. A fusion protein between MS2 and an epigenetic regulator will be constructed. The diagram presented in FIG. 9 is a representative scheme of this three component system: (CAS9/gRNA-MS2-aptamer/MS2-epigenetic regulator). Exemplary epigenetic regulators that may be used in this scheme include e.g. SHH1, SHH2, AGO4, HDA6, NRPD1, JMJ14, RDR2, NRPE1, NRPD2A/NRPE2, NRPB3/NRPD3/NRPE3A, NRPE3B, NRPB11/NRPD11/NRPE11, NRPB10/NRPD10/NRPE10, NRPB12/NRPD12/NRPE12, NRPB6A/NRPD6A/NRPE6A, NRPB6B/NRPD6B/NRPE6B, NRPB8A/NRPE8A, NRPB8B/NRPD8B/NRPE8B, NRPE5, NRPD4/NRPE4, NRPE7, NRPD7, NRPB5/NRPD5, NRPB9A/NRPD9A/NRPE9A, NRPB9B/NRPD9B/NRPE9B, ATRX, MOM1, MORC1, DNMT3A, DNMT3L, DMS3, DRD1, RDM1, DRM3, DRM2, FRG, SUVR2, MORC6, SHH1, SssI MTase, NtDRM2 MTase, SUVH2, and/or SUVH9.

[0608] A guide RNA designed to the FWA locus will be fused to the MS2 aptamer to guide the MS2-epigenetic regulator fusion protein to FWA via the dCAS9 protein.

[0609] Other RNA-binding proteins may also be used in place of MS2, such as PP7 and COM.

[0610] By way of example, a detailed summary of an exemplary MS2 fusion construct containing NtDRM2 Mtase is provided, described herein as m4UC_dCas9_MS2_NtDRM2_Mtase_gRNAMS2. For this purpose, m4UC_UBQ10_dCas9 vector will be used. This vector will contain 2 kb of the 5′ promoter of Arabidopsis UBQ10 gene driving expression of a plant codon-optimized dCas9 that is fused in its C-terminus to 1×HA tag and 7N Nuclear Localization Signals (NLS). A catalytically inactive Cas9, dCas9, will be generated by site directed mutagenesis to change D10A and H840 amino acids. Next, a modified pMDC123 vector (Curtis et al, Plant Phys, 2003) containing 700 bp of the 3′ OCS terminator will be used. 2 kb of UBQ10 promoter, the MS2 binding protein sequence containing 3×GGGS flexible linker and one NLS (Konermann et al Nature. 2014) and 2×Flag sequence will be PCR amplified and cloned in this order by Infusion (Clontech) into the unique AscI site upstream of the gateway cassette of the modified pMDC123 to create pMDC123_MS2. The fragment of pMDC123_MS2 containing UBQ10 promoter_MS2_GatewayCassette_OCS terminator will be PCR amplified and inserted by InFusion (Clontech) into the unique PmeI site of m4UC_UBQ10_dCas9 vector to create m4UC_MS2 vector. A pENTR vector (Invitrogen) containing a cDNA of NtDRM2_Mtase will be used to deliver NtDRM2_Mtase into m4UC_MS2 by LR reaction (Invitrogen) to create m4UC_MS2_NtDRM2_Mtase vector. Last, Arabidopsis U6 promoter and a gRNA with MS2 loops at tetraloop and stemloop 2 (Konermann et al Nature. 2014) will be PCR amplified and cloned into the unique PmeI site of m4UC_MS2_NtDRM2_Mtase vector by Infusion (Clontech). Different 20 nt-long gRNA protospacers against FWA promoter will be cloned into the gRNA_MS2 by PCR. Alternatively, a tRNA-gRNA expression cassette (Xie, X et al, 2015, Proc Natl Acad Sci USA. 2015 Mar. 17; 112(11):3570-5) will be used.

[0611] The nucleotide sequence of m4UC_dCas9_MS2_NtDRM2_Mtase_gRNAMS2 is presented as SEQ ID NO: 671. This vector also includes the following features: gRNA (See Table 38), U6 promoter (SEQ ID NO: 415), OCS terminator (SEQ ID NO: 416), UBQ10 promoter (SEQ ID NO: 417), Insulator (SEQ ID NO: 418), and omega enhancer (SEQ ID NO: 419). The polypeptide sequences encoded in this vector include the following: dCas9_HA_7N-NLS (SEQ ID NO: 420), which includes dCas9 (SEQ ID NO: 421), 1×HA (SEQ ID NO: 422), and 7N-NLS (SEQ ID NO: 423); and MS2_3×GGGGS_NLS_2×Flag_NtDRM2_MTase (SEQ ID NO: 424), which includes MS2 (SEQ ID NO: 425), 3×GGGGS (SEQ ID NO: 426), NLS (SEQ ID NO: 427), 2×FLAG (SEQ ID NO: 428), and NtDRM2_Mtase (SEQ ID NO: 631).

[0612] Arabidopsis fwa-4 plants will be transformed with these constructs and evaluated for flowering time phenotypes as described in Examples 1 and 2.

[0613] It is thought that the targeting scheme described in this Example will allow the epigenetic regulator to be targeted a locus of interest and induce epigenetic silencing. Early flowering of fwa-4 plants expressing these constructs relative to Col-O wild-type plants will serve as a proxy of silencing of the FWA locus. Molecular analysis of the plants will also be done to analyze methylation status of the target.

### Example 4: Modified CRISPR-Targeting of Epigenetic Regulators to Specific Loci Using SunTag Constructs

[0614] This Example describes exemplary experimental guidelines for constructing recombinant constructs for use in a modified CRISPR-targeting scheme involving epigenetic regulators as disclosed herein, dCAS9 proteins, and SunTag constructs. These constructs may be used to target an epigenetic regulator to a specific locus of a genome using the CRISPR-CAS9 system.

[0615] Example 2 describes the recombinant fusing of epigenetic regulator proteins to a dCAS9 protein to target these epigenetic regulators to the FWA locus. However, it is possible that in some instances, the fusion between the epigenetic regulator and the dCAS9 protein may impact the function of the epigenetic regulator, the dCAS9 protein, or both the epigenetic regulator and the dCAS9 protein. Further, previous work with CRISPR targeting has demonstrated that fusing a protein of interest to a CAS9 protein results in variable abilities to target transcriptional regulation of a locus of interest. Normally, a single copy of a protein has been fused to either the N- or C-terminal portion of CAS9. One way to circumvent these potential issues is to use other methods of CRISPR-targeting the epigenetic regulator to the locus of interest other than by fusing the epigenetic regulator to the dCAS9 protein.

[0616] Recently, a technique called SunTag was developed to recruit many effector proteins simultaneously to a location via one dCAS9 protein. In this way, there is an amplification of the effect of targeting, and improved magnitude of gene regulation (Tanenbaum et al, 2014). Tanenbaum et al. described that a dCas9 protein was fused to an unstructured peptide that contains up to 24 copies of the GCN4 epitope. A single chain antibody, scFV, designed to bind this peptide sequence with high affinity and specificity, was fused to an effector protein for gene regulation. Co-expression of the two components allows binding of up to 24 copies of the antibody-fused effector protein to each CAS9-GCN4 fusion protein. In the case of VP64 as an effector protein, this procedure resulted in very high activation of gene expression compared to simple CAS9-VP64 fusion proteins.

[0617] A similar technique will be used herein to allow e.g. 10-24 copies of an epigenetic regulator to bind a dCAS9-GCN4 fusion protein. The targeting scheme described in this Example will use a dCAS9-GCN4 fusion similar to that described by Tanenbaum above, but will also involve expressing a fusion of an epigenetic regulator to the scFV antibody. The diagram presented in FIG. 10 is a representative scheme of this targeting system. Exemplary epigenetic regulators that may be used in this scheme include e.g. SHH1, SHH2, AGO4, HDA6, NRPD1, JMJ14, RDR2, NRPE1, NRPD2A/NRPE2, NRPB3/NRPD3/NRPE3A, NRPE3B, NRPB11/NRPD11/NRPE11, NRPB10/NRPD10/NRPE10, NRPB12/NRPD12/NRPE12, NRPB6A/NRPD6A/NRPE6A, NRPB6B/NRPD6B/NRPE6B, NRPB8A/NRPE8A, NRPB8B/NRPD8B/NRPE8B, NRPE5, NRPD4/NRPE4, NRPE7, NRPD7, NRPB5/NRPD5, NRPB9A/NRPD9A/NRPE9A, NRPB9B/NRPD9B/NRPE9B, ATRX, MOM1, MORC1, DNMT3A, DNMT3L, DMS3, DRD1, RDM1, DRM3, DRM2, FRG, SUVR2, MORC6, SHH1, SssI MTase, NtDRM2 MTase, SUVH2, and/or SUVH9. A guide RNA designed to target the FWA locus will be co-expressed with the U6 promoter as in the schemes.

[0618] By way of example, a detailed summary of an exemplary SunTag fusion construct containing DMS3 is provided, described herein as m4UC_dCas9_1×HA_2×NLS_GCN4×10_scFv_sfGFP_DMS3_GB1_REX NLS_gRNA. For cloning the SunTag construct (Tanenbaum et al., Cell 2014), the m4UC_UBQ10 vector will be used. This vector contains ˜2 kb of the promoter of the Arabidopsis UBQ10 gene. The dCas9_1×HA_2×NLS_GCN4×10 fusion will be PCR amplified from one of the original SunTag plasmids from Addgene (pHRdSV40-NLS-dCas9-2×NLS-10×GCN4_V4-NLS-P2A-BFP-NLS-dWPRE, Vale lab). Through the use of two unique restriction sites (HpaI and SmaI), the amplified dCas9 will be inserted into m4UC by In-Fusion cloning (Clontech), such that the UBQ10 promoter drives dCas9 expression, and an OCS terminator follows the sequence. Next, by using a unique PmeI site, a UBQ10 promoter (along with unique restriction sites flanking the promoter) will be inserted into m4UC downstream from a TBS insulator through In-Fusion cloning. Using another one of the SunTag plasmids from Addgene (pHRdSV40-scFv GCN4-sfGFP-VP64-GB1-Rex_NLS-dWPRE), a series of PCRs will replace VP64 with DMS3 flanked by unique restriction sites. The single-chain variable fragment antibody (scFv)+superfolder GFP (sfGFP)+DMS3+GB1+REX NLS PCR amplicon will then be cloned into m4UC downstream from the UBQ10 promoter with In-Fusion cloning using a new unique PmeI site. Through subsequent In-Fusion cloning deletions and additions of PmeI sites, a NOS terminator will be inserted downstream from the REX NLS, followed by a U6 promoter driving the expression of a gRNA. A unique PmeI site at the end also enables the addition of multiple U6 promoter driven gRNAs.

[0619] The nucleotide sequence of m4UC_dCas9_1×HA_2×NLS_GCN4×10_scFv_sfGFP_DMS3_GB1_REX NLS_gRNA is presented as SEQ ID NO: 430. This vector also includes the following features: UBQ10 promoter (SEQ ID NO: 431), Omega RBC (SEQ ID NO: 432), OCS terminator (SEQ ID NO: 433), TBS insulator (SEQ ID NO: 434), NOS terminator (SEQ ID NO: 435), U6 promoter+gRNA (SEQ ID NO: 436), and protospacer (SEQ ID NO: 437). The polypeptide sequences encoded in this vector include the following: Cas9 portion (SEQ ID NO: 438), which includes dCas9 (SEQ ID NO: 439), 1×HA (SEQ ID NO: 440), NLS (SEQ ID NO: 441), flexible linker (SEQ ID NO: 442), and GCN4×10 (SEQ ID NO: 443), as well as the antibody portion (SEQ ID NO: 444), which includes scFV (SEQ ID NO: 445), sfGFP (SEQ ID NO: 446), GGGGG linker (SEQ ID NO: 447), DMS3 (SEQ ID NO: 448), GB1 (SEQ ID NO: 449), and REX NLS (SEQ ID NO: 450).

[0620] Arabidopsis fwa-4 plants will be transformed with these constructs and evaluated for flowering time phenotypes as described in Examples 1 and 2.

[0621] It is thought that the targeting scheme described in this Example will allow the epigenetic regulator to be targeted a locus of interest and induce epigenetic silencing. Early flowering of fwa-4 plants expressing these constructs relative to Col-O wild-type plants will serve as a proxy of silencing of the FWA locus.

### Example 5: In Vivo DNA Methylation and Silencing of a Reporter Transgene by Transient Expression in Nicotiana benthamiana

[0622] This Example demonstrates in vivo DNA methylation and silencing of a reporter transgene by transient expression of a targeting construct in Nicotiana benthamiana.

[0623] In order to test the ability to methylate target sequences in vivo using the ZF108- or CRISPR/CAS9-targeted NtDRM2 catalytic domain, a transient expression assay in N. benthamiana was utilized. Briefly, a reporter construct, where the FWA promoter sequence was cloned upstream of the reporter gene Luciferase (LUC), was expressed in N. benthamiana together with a negative control plasmid-GUS-, or with the pMDC_ZF_NtDRM2_Mtase or the pMDC_dCas9_NtDRM2_Mtase plasmids, including the tRNA-gRNA expression cassettes (See Materials and Methods). After 3 days, infiltrated leaves were collected and DNA and RNA were extracted in order to analyze DNA methylation over the FWA promoter and the expression level of the FWA-driven LUC transgene. After bisulfite treatment of the different DNA samples, PCR using specific primers for different FWA promoter regions was performed (BS-PCR).

### Materials and Methods

[0624] Materials and Methods not otherwise detailed in this section can be found in Example 2 above (e.g. specific gRNA sequences).

[0625] Cloning of pMDC_dCas9_1×HA_7N-NLS_NtDRM2_Mtase

[0626] For this purpose, a modified pMDC123 plasmid (Curtis et al, 2003, Plant Phys) was created first. A fragment containing 1990 bp of the promoter region of Arabidopsis UBQ10 gene was cloned, followed by a plant codon-optimized dCas9, containing an omega RBC translational enhancer at the N-terminus of dCas9 and 1×HA tag followed by a nuclear localization signal (NLS) at the C-terminus of dCas9, creating pMDC_dCas9_1×HA_7N-NLS_Gateway. A cDNA sequence of Nicotiana tabacum DRM2 methyltransferase domain (NtDRM2_Mtase) was cloned first into pENTR/D plasmid (Invitrogen) and then delivered into pMDC_dCas9_1×HA_7N-NLS_Gateway by LR reaction (Invitrogen), creating an in-frame fusion of NtDRM2_Mtase cDNA with the upstream dCas9_1×HA_7N-NLS cassette. Two different tRNA-gRNA expression cassettes, one with two different gRNAs and one with four different gRNAs, were created by gene synthesis (SGI-DNA), and inserted at the HindIII restriction site of pMDC_dCas9_×HA_7N-NLS_NtDRM2_Mtase, upstream of the UBQ10 promoter sequence.

[0627] The nucleotide sequences of relevant features of pMDC_dCas9_1×HA_7N-NLS_NtDRM2_Mtase (SEQ ID NO: 634), are set forth, including the UBQ10 promoter (SEQ ID NO: 625), OMEGA enhancer (SEQ ID NO: 626), dCas9 (SEQ ID NO: 627), 1×HA (SEQ ID NO: 628), 7N-NLS (SEQ ID NO: 629), linker (SEQ ID NO: 630), NtDRM2_Mtase cDNA (SEQ ID NO: 631), Terminator (SEQ ID NO: 632). The construct containing pMDC_dCas9_1×HA_7N-NLS_NtDRM2_Mtase also contained the respective tRNA_gRNA (U6p::tRNA-4-17, SEQ ID NO: 642, or U6p::tRNA-16-14-3-17, SEQ ID NO: 657).

[0628] To target the FWA locus, various alternative gRNA sequences were used in the tRNA_gRNA expression constructs, as presented in Table 5A.

TABLE 5A
Sequence of the different gRNAs used in the tRNA-
gRNA expression cassette

| | crRNA Sequence |
|---|---|
| gRNA Name | (5′ → 3′) |
| gRNA3 | ATTCTCGACGGAAAGATGTA |
| | (SEQ ID NO: 893) |
| gRNA4 | ACGGAAAGATGTATGGGCTT |
| | (SEQ ID NO: 894) |
| gRNA14 | CCATTGGTCCAAGTGCTATT |
| | (SEQ ID NO: 895) |
| gRNA16 | GCGGCGCAAGATCTGATATT |
| | (SEQ ID NO: 896) |
| gRNA17 | AAAACTAGGCCATCCATGGA |
| | (SEQ ID NO: 897) |

[0629] Features of pFWA:LUC

[0630] The construction of pFWA:LUC is described above. The nucleotide sequence of pFWA:LUC is set forth as SEQ ID NO: 677.

[0631] Transient Expression in N. benthamiana by Agroinfiltration

[0632] The following protocol was used for the agroinfiltration procedure:

### Day 1

[0633] Inoculate 5 ml LB containing 10 μL of Rif (50 mg/ml) and 5 μL (50 mg/ml) of Kanamycin using a single agrobacterium colony.
[0634] Incubate them at 28° C. overnight.

### Day 2

[0635] Make 25 ml LB media containing MES (10 mM, pH5.6), Acetosyringone (20 μM).
[0636] Use 500 μl from 5 ml LB culture grown overnight to inoculate the 25 ml LB.
[0637] Incubate them at 28° C. overnight.

### Day 3

[0638] Spin down the 25 ml cultures: 20 mins, 4000 rpm, 28° C.
[0639] Make agroinfiltration buffer (IB) (10 mM MES pH5.6, 10 mM MgCl2, 200 μM Acetosyringone)
[0640] Re-suspend the pellet in 5 ml of Infiltration buffer (Agro stock)
[0641] Use 100 μL from Agro stock to measure the concentration of the agrobacteria at OD 600. Concentration of Agrobacteria containing different plasmid was set at 0.5.
[0642] Incubate for 2 hours at room temperature.
[0643] Infiltrate 7-8 leaves of 4 week old N. benthamiana. At least 3-4 leaves are collected and pooled for each time point.

### Results

[0644] Agroinfiltrated leaves with the constructs described above were analyzed. Sequencing of the BS-PCR products shows that both ZF_NtDRM2_Mtase and dCas9_NtDRM2_Mtase, driven by gRNA4 and 17, were able to promote DNA methylation of FWA (FIG. 11), whereas the FWA+GUS control was unmethylated. Further, whole genome bisulfite sequencing of two representative ZF-NtDRM2_Mtase T1 plants and a Col0 wild-type control revealed robust methylation of the FWA promoter by ZF-NtDRM2_Mtase (FIG. 13). This demonstrates that NtDRM2_Mtase can cause in vivo de novo DNA methylation when targeted either by artificial Zinc Fingers or CRISPR/Cas9 to a genomic locus.

[0645] In addition, reduced expression levels of the FWA promoter-driven luciferase transgene (LUC), in samples co-infiltrated with ZF_NtDRM2_Mtase and dCas9_NtDRM2_Mtase, (gRNA4 and 17), indicates that targeted hypermethylation of the FWA promoter is correlated with gene silencing (FIG. 12).

### Example 6: CRISPR-Targeting of NtDRM2_Mtase to the FWA Locus in Arabidopsis

[0646] This Example describes exemplary experimental guidelines for constructing recombinant constructs for use in a modified CRISPR-targeting scheme using a plant codon-optimized CAS9 protein that carries two point mutations within the endonuclease domain that is recombinantly fused to a NtDRM2_Mtase protein (pdCAS9-Mtase), and a tRNA-gRNA expression cassette composed of two or four different gRNAs targeting the FWA locus in Arabidopsis. fwa-4 mutant plants harboring pdCAS9-Mtase and guide RNA targeting the FWA locus are expected to experience early flowering relative to the control fwa-4 line, and methylation of the FWA sequence.

### Materials and Methods

[0647] The DNA constructs used in this experiment will be exactly as described in Example 5.

[0648] Transformation of Fwa-4 Plants

[0649] Agrobacterium AGL0 cells will be transformed with the plasmids described above and Arabidopsis fwa-4 plants will be transformed with this Agrobacterium strain using the floral dip method which is well known in the art.

[0650] Flowering Time Measurements

[0651] Progeny of transformed plants (T1s) will be planted and screened for glufosinate-resistant plants that incorporate the T-DNA into the Arabidopsis genome, which confers resistance to glufosinate. Among the glufosinate-resistant transgenic plants, flowering time will be measured and compared to early-flowering wild-type Col-O and late-flowering fwa-4 plants. Flowering time will be measured by counting the total number of leaves (rossette and cauline) of each individual plant.

[0652] FWA Promoter and Expression Analysis

[0653] Molecular analysis of the FWA promoter (e.g. methylation status) and FWA expression levels in plants transformed with the constructs described above will be performed as described above.

### Example 7: DNA-Binding Domain-Targeting of ATRX, MOM1, and MORC1 to the FWA Locus

[0654] This Example demonstrates the targeting of ATRX, MOM1, and MORC1 polypeptides to the FWA locus via zinc finger targeting.

### Materials and Methods

[0655] Recombineering of ATRX-3×FLAG-ZNF108

[0656] The sequence of 3×FLAG-ZNF108 was inserted at the 3′ end of the ATRX genomic sequence in a transformation-competent artificial chromosome clone using a bacterial recombineering approach (Crawford et al., Science 347(6222):655-9). This approach results in a cassette in which ATRX is driven by its own endogenous promoter. The accession number of ATRX is AT1G08600.

[0657] The nucleotide sequence of the ATRX-3×FLAG-ZNF108 expression cassette is presented in SEQ ID NO: 720. Features of this cassette include: 5′ UTR (SEQ ID NO: 721), ATRX genomic DNA (SEQ ID NO: 722), linker (SEQ ID NO: 723), 3×FLAG (SEQ ID NO: 724), linker (SEQ ID NO: 725), ZNF108 (SEQ ID NO: 726), 3′ UTR (SEQ ID NO: 727). The amino acid sequence of ATRX-3×FLAG-ZNF108 is presented in SEQ ID NO: 728. Features include ATRX (SEQ ID NO: 729), linker (SEQ ID NO: 730), 3×FLAG (SEQ ID NO: 731), linker (SEQ ID NO: 732), and ZNF108 (SEQ ID NO: 733). A schematic of the cassette is presented in FIG. 14A.

[0658] Recombineering of MOM1-3×FLAG-ZNF108

[0659] The sequence of 3×FLAG-ZNF108 was inserted at the 3′ end of the MOM1 genomic sequence in a transformation-competent artificial chromosome clone using a bacterial recombineering approach (Crawford et al., Science 347(6222):655-9). This approach results in a cassette in which MOM1 is driven by its own endogenous promoter. The accession number of MOM1 is AT1G08060.

[0660] The nucleotide sequence of the MOM1-3×FLAG-ZNF108 expression cassette is presented in SEQ ID NO: 734. Features of this cassette include: 5′ UTR (SEQ ID NO: 735), MOM1 genomic DNA (SEQ ID NO: 736), linker (SEQ ID NO: 737), 3×FLAG (SEQ ID NO: 738), linker (SEQ ID NO: 739), ZNF108 (SEQ ID NO: 740), 3′ UTR (SEQ ID NO: 741). The amino acid sequence of MOM1-3×FLAG-ZNF108 is presented in SEQ ID NO: 742. Features include MOM1 (SEQ ID NO: 743), linker (SEQ ID NO: 744), 3×FLAG (SEQ ID NO: 745), linker (SEQ ID NO: 746), and ZNF108 (SEQ ID NO: 747). A schematic of the cassette is presented in FIG. 16A.

[0661] Construction of MORC1_Flag_ZF

[0662] The 3×Flag-ZF108-BLRP fusion in the pCR2 plasmid was digested with AscI and inserted in the single AscI site of the pENTR-MORC1 plasmid (Moissard et al, 2014), located 6 base pairs after the end of the coding sequence of MORC1 (from A. thaliana). The resulting plasmid was recombined into JP726 using LR clonase (Invitrogen) to create pEG302_MORC1_3×Flag_ZF108.

[0663] Plant Transformation

[0664] All constructs were introduced into fwa-4 plants using Agrobacterium-mediated transformation. Transformed lines were selected using BASTA.

[0665] Flowering Time Measurements

[0666] Flowering time was measured by counting the total number of leaves (rossette and cauline) of each individual plant.

[0667] Bisulfite Sequencing and Data Analysis

[0668] Bisulfite sequencing followed by PCR amplification and cloning of FWA fragments was done using EZ DNA Methylation-Gold kit (Zymo Research) as performed in Johnson et al. (2008). BS-Seq libraries were generated using the Ovation Ultralow Methyl-seq Library kit from Nugen, and all libraries were sequenced using HiSeq sequencers following manufacturer instructions (Illumina) at a length of 50 bp. Bisulfite-Seq (BS-Seq) reads were aligned to the TAIR10 version of the Arabidopsis thaliana reference genome using BS-seeker. For BS-Seq up to 2 mismatches were allowed and only uniquely mapped reads were used.

### Results

[0669] To explore whether ATRX, MOM1, and MORC1 have the ability to trigger de novo DNA methylation at the FWA locus, or otherwise silence this locus, in the fwa-4 mutant, a series of experiments were conducted in an attempt to target these polypeptides to the promoter of the FWA gene in Arabidopsis. These polypeptides were fused to the ZF108 zinc finger, which targets the FWA promoter (see Example 1), and transformed into the fwa-4 mutant. ZF-targeting lines were constructed as described above. The flowering time of independent transgenic lines was scored.

[0670] MORC1-ZF

[0671] The flowering time results for MORC1-ZF are shown below in Table 7A. ˜57% of the T1 lines analyzed showed early flowering relative to the fwa-4 mutant. The results suggest that MORC1 was able to be targeted to the FWA locus via ZF-targeting and induce silencing of this locus.

TABLE 7A
Early flowering in T1 lines compared to fwa-4

| | early | late | % early |
|---|---|---|---|
| MORC1-ZF | 26 | 20 | 57 |

[0672] ATRX-ZF

[0673] Flowering time was also analyzed in ATRX-ZF lines. As can be seen in FIG. 14B, two independent T2 lines housing ATRX-ZF are shown that exhibited early flowering as compared to the fwa mutant. The results suggest that ATRX was able to be targeted to the FWA locus via ZF-targeting and induce silencing of this locus.

[0674] In order to analyze whether the early flowering phenotype in the ATRX-ZF lines was due to the methylation of the FWA promoter, a bisulfite sequencing assay was performed in independent ATRX-ZF lines that showed the early flowering phenotype relative to fwa-4. The results, which are presented in FIG. 15, interestingly show that robust DNA methylation was not re-established at FWA in the ATRX-ZF lines. This is interesting because although introduction of ATRX-ZF into the fwa mutant background did not induce robust methylation at the targeted FWA locus in T2 plants, these ATRX-ZF T2 plants nonetheless exhibit early flowering in an otherwise late-flowering fwa mutant background. Regardless of the mechanism, the early flowering phenotypes observed in transgenic fwa-4 plants housing ATRX-ZF is evidence that FWA was silenced, even if that silencing is not a function of re-establishment of DNA methylation at the FWA promoter.

[0675] MOM1-ZF

[0676] Flowering time was also analyzed in MOM1-ZF lines. As can be seen in FIG. 16B, four independent T2 lines housing MOM1-ZF showed early flowering as compared to the fwa mutant. The results suggest that MOM1 was able to be targeted to the FWA locus via ZF-targeting and induce silencing of this locus.

[0677] In order to analyze whether the early flowering phenotype in the MOM1-ZF lines was due to the methylation of the FWA promoter, a bisulfite sequencing assay was performed in independent MOM1-ZF lines that showed the early flowering phenotype relative to fwa-4. The results, which are presented in FIG. 17, show that robust DNA methylation was re-established at FWA in the MOM1-ZF lines. Thus, MOM1-ZF was effective in targeting methylation at the FWA promoter. Of particular note, MOM1-ZF T2 plant #M2-2 did not contain the MOM1-ZF transgene, yet still exhibited early flowering and methylation at the FWA promoter. This result suggests that MOM1-ZF-mediated methylation is stably inherited in progeny plants even after crossing away the MOM1-ZF transgene.

### Example 8: DNA-Binding Domain-Targeting of SssI Methyltransferase to the FWA Locus

[0678] This Example demonstrates the targeting of SssI methyltransferase protein to specific loci to cause CG-specific DNA methylation.

### Materials and Methods

[0679] Plasmid Construction

[0680] For this purpose, a modified pMDC123 plasmid (Curtis et al, 2003, Plant Phys) was created first, containing 1990 bp of the promoter region of Arabidopis UBQ10 gene upstream of the BLRP_ZF108_3×Flag cassette present in one of the modified pCR2 plasmids described above. Both the UBQ10 promoter and BLRP_ZF108_3×Flag are upstream of the gateway cassette (Invitrogen) present in the original pMDC123 plasmid. A plant codon-optimized cDNA sequence of the Methyltransferase gene from Spiroplasma sp. strain MQ1 (M.SssI) was cloned first into pENTR/D plasmid (Invitrogen) and then delivered into the modified pMDC123 by LR reaction (Invitrogen), creating an in-frame fusion of M.SssI cDNA with the upstream BLRP_ZF_3×Flag cassette.

[0681] The nucleotide sequence of the pUBQ10::ZF_3×Flag_M.SssI expression cassette is presented in SEQ ID NO: 756. Features of this cassette include:UBQ10 promoter (SEQ ID NO: 757), ZF108 (SEQ ID NO: 758), 3×FLAG (SEQ ID NO: 759), plant codon optimized M.SssI (SEQ ID NO: 760), and OCS term (SEQ ID NO: 761). The amino acid sequence of ZF_3×Flag_SssI is presented in SEQ ID NO: 762. Features include ZF108 (SEQ ID NO: 763), 3×FLAG (SEQ ID NO: 764), and SssI (SEQ ID NO: 765).

[0682] Plant Transformation and Flowering Time Measurement

[0683] This construct above was introduced into fwa-4 plants using Agrobacterium-mediated transformation. Transformed lines were selected using BASTA. Flowering time was scored by counting the number of rossette and caulinar leaves.

[0684] Bisulfite Sequencing and Data Analysis

[0685] BS-Seq libraries were generated using the Ovation Ultralow Methyl-seq Library kit from Nugen, and all libraries were sequenced using HiSeq sequencers following manufacturer instructions (Illumina) at a length of 50 bp. Bisulfite-Seq (BS-Seq) reads were aligned to the TAIR10 version of the Arabidopsis thaliana reference genome using BS-seeker. For BS-Seq up to 2 mismatches were allowed and only uniquely mapped reads were used.

[0686] Results

[0687] From Example 1, it was found that a ZF-SssI fusion protein in the fwa-4 mutant background was able to induce early flowering of these plants as compared to fwa-4 controls, consistent with silencing of FWA in the ZF-SssI lines. These results are presented in graphical form in FIG. 18.

[0688] To analyze the methylation status of the FWA promoter in the ZF-SssI lines, a whole-genome bisulfite sequencing assay was performed in two independent ZF108-SssI lines that showed the early flowering phenotype. The results, which are presented in FIG. 19 and FIG. 20, demonstrate that the FWA promoter is being methylated in these lines, predominantly in the CG context. Strikingly, CG methylation in these lines extended over a much larger region than just the FWA promoter, and in fact covered the entire genome. It thus appears that ZF-SssI is able to induce genome-wide CG hypermethylation.

[0689] As a consequence of the massive accumulation of CG methylation throughout the genome, plants in the T2 generation showed abnormal phenotypes and pigmentation chimeras in the leaves (FIG. 21A and FIG. 21B), probably as a consequence of gene mis-regulation caused by hypermethylation.

[0690] Targeting SssI polypeptides to specific loci in a manner that actually induces genome-wide hypermethylation, as described herein, may have applications in crop science. For example, this technology may be used to create novel epigenetic traits, and/or to restore the loss of methylation at specific but unknown genes, for instance those that lose methylation during tissue culturing.

### Example 9: Targeting of DRM2-MTase to Specific Loci Using SunTag System

[0691] This Example demonstrates the targeting of the catalytic domain of DRM2, using a SunTag system, to specific loci in plants and the subsequent induction of methylation of the targeted loci.

### Materials and Methods

[0692] Plasmid Construction

[0693] The SunTag VP64 constructs as described in Tanenbaum et al, 2014 were ordered from Addgene (pHRdSV40-dCas9-10×GCN4_v4-P2A-BFP and pHRdSV40-scFv-GCN4-sfGFP-VP64-GB1-NLS). These constructs were used as starting materials to construct a SunTag targeting system using DRM2-MTase, with all components of the system present on a single vector. The catalytic methylatransferase domain (residues 255-608) of the Nicotiana tabacum DRM2 protein (DRM2-MTase) was used to replace VP64 with a methylation effector.

[0694] Plant-specific promoters and transcriptional terminators were used in the new construct, although a human codon-optimized, nuclease-deficient (hdCAS9) was also used. Human codon optimized dCas9 expression, which is fused to one HA tag, two nuclear localization signals, and a linker followed by a 10× epitope tail (10×GCN4), was driven by the plant UBIQUITIN10 (UBQ10) promoter, which is ubiquitously expressed in Arabidopsis. The UBQ10 promoter preceding dCas9-10×GCN4 was followed by an Omega translational enhancer sequence. The single chain antibody (scFV) portion of the system, which was also driven by the UBQ10 promoter, was fused to superfolder GFP, followed by a linker, DRM2-MTase, another linker, an NLS that was added for plant nuclear localization, GB1, and a REX NLS. The dCas9-10×GCN4 and scFv-VP64 cassettes were separated by a plant-specific TBS insulator sequence (SEQ ID NO: 766). gRNA expression was controlled by the Pol III specific U6 promoter and termination was controlled by the Pol III termination sequence.

[0695] All features of the constructed SunTag DRM2-MTase system were present on a single vector. The dCAS9-10×GCN4 cassette, scFv-DRM2-MTase cassette, and respective gRNA cassette were cloned into a binary vector using In-Fusion cloning. Only one respective gRNA cassette was present in the SunTag vector transformed into plants. A schematic of the expression cassettes for the SunTag DRM2-MTase system is presented in FIG. 22.

[0696] Construction of dCAS9-10×GCN4 Cassette

[0697] The dCAS9-10×GCN4 portion of the SunTag DRM2-MTase vector that was constructed is contained in expression cassette pUBQ10_Omega RBC_dCas9_1×HA_2×NLS_flexible linker_10×GCN4 (nucleic acid sequence presented in SEQ ID NO: 767). This cassette contains the following features and nucleic acid sequences are provided: UBQ10 promoter (SEQ ID NO: 768), Omega RBC translation enhancer (SEQ ID NO: 769), dCas9 (SEQ ID NO: 770), 1×HA (SEQ ID NO: 771), 2×NLS (SEQ ID NO: 772), flexible linker (SEQ ID NO: 773), 10×GCN4 (SEQ ID NO: 774). The expression cassette further included an OCS terminator (SEQ ID NO: 775).

[0698] This expression cassette produces a recombinant dCas9-10×GCN4 fusion protein (SEQ ID NO: 776): dCAS9-1×HA-2×NLS-flexible linker-10×GCN4. The amino acid sequences of features present in the recombinant fusion protein expressed from this expression cassette are: dCAS9 (SEQ ID NO: 777), 1×HA (SEQ ID NO: 778), 2×NLS (SEQ ID NO: 779), flexible linker (SEQ ID NO: 780), and 10×GCN4 (SEQ ID NO: 781).

[0699] Construction of scFv-DRM2-MTase Cassette

[0700] The scFv-DRM2-MTase portion of the SunTag DRM2-MTase vector that was constructed is contained in expression cassette pUBQ10-scFv-sfGFP-glycine linker-DRM2-MTase-glycine linker-SV40 type NLS-GB1-REX NLS-NOS terminator (nucleic acid sequence presented in SEQ ID NO: 782). This cassette contains the following features and nucleic acid sequences are provided: UBQ10 promoter (SEQ ID NO: 783), scFv single chain antibody (SEQ ID NO: 784), sfGFP (SEQ ID NO: 785), glycine linker (SEQ ID NO: 786), DRM2-MTase (SEQ ID NO: 787), glycine linker (SEQ ID NO: 786), SV40 type NLS (SEQ ID NO: 788), GB1 (SEQ ID NO: 789), REX NLS (SEQ ID NO: 790), and NOS terminator (SEQ ID NO: 791).

[0701] This expression cassette produces a recombinant scFv-DRM2-MTase fusion protein (SEQ ID NO: 792): scFv-sfGFP-glycine linker-DRM2-MTase-glycine linker-SV40 type NLS-GB 1-REX NLS. The amino acid sequences of features present in the recombinant fusion protein expressed from this expression cassette are: scFv (SEQ ID NO: 793), sfGFP (SEQ ID NO: 794), glycine linker (SEQ ID NO: 795), DRM2-MTase (SEQ ID NO: 796), SV40-type NLS (SEQ ID NO: 797), GB1 (SEQ ID NO: 798), and REX NLS (SEQ ID NO: 799).

[0702] Construction of gRNA Cassettes

[0703] For targeting the FWA gene promoter, a gRNA expression cassette was constructed. This expression cassette was U6:gRNA4 (nucleic acid sequence presented in SEQ ID NO: 800). This cassette contains the following features and nucleic acid sequences are provided: U6 promoter (SEQ ID NO: 801), protospacer #4 (SEQ ID NO: 802), gRNA backbone (SEQ ID NO: 803), and PolIII terminator (SEQ ID NO: 804).

[0704] Design of tRNA:gRNA Cassette for Targeting the FWA Promoter

[0705] A tRNA:gRNA.expression cassette was designed for targeting the FWA promoter. This cassette for targeting FWA includes two different gRNA molecules and uses protospacer #4 and protospacer #17. The sequence of this cassette is presented in SEQ ID NO: 805.

[0706] Construct Transformation into Arabidopsis

[0707] The vector described above housing the SunTag DRM2-MTase expression system was transformed into Agrobacterium. The vector was then introduced into fwa-4 epimutant Arabidopsis thaliana plants using Agrobacterium-mediated transformation via the floral dip method. T1 transgenic plants were selected based on their resistance to Hygromycin.

[0708] Fluorescent Microscopy

[0709] Visualization of sfGFP fluorescence was performed using a Zeiss confocal microscope and recommended wavelengths to visualize GFP fluorescence. Leaf sections were taken from transgenic SunTag DRM2-MTase plants and placed on microscope slides for visualization.

[0710] Bisulfite Sequencing

[0711] BS-Seq libraries were generated as previously reported (Cokus et al., 2008) and all libraries were sequenced using the HiSeq 2000 platform following manufacturer instructions (Illumina) at a length of 50 bp. Bisulfite-Seq (BS-Seq) reads were aligned to the TAIR10 version of the Arabidopsis thaliana reference genome using BS-seeker. For BS-Seq, up to 2 mismatches were allowed and only uniquely mapped reads were used.

[0712] Chromatin Immunoprecipitation (ChIP) and ChIP-Seq

[0713] Transgenic SunTag DRM2-MTase seeds were plated on MS media and grown. Tissue was collected and two grams were used to grind the tissue. Nuclear Isolation Buffer, protease inhibitors, and 1% formaldehyde was then added to the powder. This solution was incubated at room temperature on a rotator for 10 minutes. Glycine was then added to stop cross-linking. The solution was filtered, spun down, and the resulting pellet was resuspended with extraction buffer 2+inhibitors. This was spun down, and the resulting pellet was resuspended with extraction buffer 3+inhibitors. This was spun and resuspended with Nuclear Lysis Buffer. The solution was moved to a new tube and diluted with ChIP dilution buffer. Samples were then sonicated (30 seconds on, 30 seconds off at maximum power for 15 minutes). dCas9 and the SunTag system were then immunoprecipitated using an anti-HA antibody. Samples were then washed and eluted. DNA was then extracted using phenol-chloroform and libraries were then made for sequencing by following the procedures recommended by the NuGEN kit used. Sequencing reads were then aligned using bowtie2.

### Results

[0714] In preliminary work, it was found that the scFv-sfGFP fusion protein from the construct described in Tanenbaum et al, 2014 did not localize to the nucleus in plants. This construct from Tanenbaum et al, 2014 was thus re-designed to replace the failed NLS with a linker followed by a modified SV40-type NLS. This is the vector described above in the Materials and Methods. T2 plants housing this SunTag DRM2-MTase vector were similarly evaluated for nuclear localization of the scFv-sfGFP-DRM2-MTase fusion protein. As can be seen in FIG. 23, the SV40-type NLS was able to facilitate nuclear localization of the scFv-sfGFP-DRM2-MTase fusion protein.

[0715] Targeting FWA Expression Using gRNA4

[0716] Following confirmation that the SunTag DRM2-MTase expression system components were being expressed and localized to the nucleus as described above, various plant lines were evaluated for whether this system could target DRM2-MTase to the FWA promoter and induce methylation. Various T2 lines housing the SunTag DRM2-MTase construct that contains gRNA4 (which targets the FWA promoter) were evaluated for methylation levels at the FWA promoter.

[0717] Multiple plants from multiple independent T2 SunTag DRM2-MTase+gRNA4 lines exhibited increased CG, CHG, and CHH methylation at the FWA promoter as compared to fwa-4 controls. FIG. 24 shows examples of the increased CHH methylation. In fwa mutants, an epimutation results in loss of methylation from the FWA promoter, as was observed in FIG. 24. The data indicates that introduction of the SunTag DRM2-MTase+gRNA4 system was able to induce methylation of the FWA promoter in an otherwise fwa-4 epimutant background.

[0718] As described above, the results suggest that, in the SunTag DRM2-MTase lines containing a gRNA that targets the FWA promoter, the gRNA is able to successfully guide Cas9 to the FWA locus, and that DRM2-MTase is then able to induce methylation of FWA. To confirm that Cas9 was targeted to the FWA promoter in the SunTag lines, ChIP-seq of Cas9 using an anti-HA antibody (Cas9 is 1×HA tagged) was performed. As can be seen in FIG. 24, ChIP-seq data confirmed Cas9 binding to FWA via gRNA4.

[0719] ChIP-seq samples were further analyzed to view genome-wide binding of Cas9 to genomic regions. The results illustrated in FIG. 24 demonstrate an enrichment of Cas9 over the FWA promoter. ChIP-seq analysis also revealed only one major off-target of gRNA4 (FIG. 25). This off-target contained a PAM sequence+14 base pairs that were complementary to gRNA4. As can be seen in FIG. 25, this off-target in the SunTag DRM2-MTase+gRNA4 lines was also hypermethylated (mostly in the CHH context) as compared to an fwa-4 control.

[0720] Overall, the results suggest that, in the SunTag DRM2-MTase lines containing a gRNA that targets the FWA promoter (gRNA4), the gRNA is able to successfully guide Cas9 to the FWA locus, and that DRM2-MTase is then able to induce methylation of FWA.

### Example 10: Additional Zinc Finger Proteins (ZFPs) Fused to DRM2-MTase

[0721] This Example describes the use of additional Zinc Finger Proteins (ZFPs) fused to the NtDRM2 methyltransferase domain to methylate the promoter region of the Arabidopsis SUPERMAN gene.

### Materials and Methods

[0722] Different artificial Zinc Finger Proteins (ZFPs) were designed as described in Segal et al. 2003; Kolb et al. 2005, and Johnson et al. 2014 to bind to the promoter of Arabidopsis SUPERMAN. The resulting sequences were plant-codon optimized and synthesized (IDT technologies). The new ZFPs were cloned in a modified pMDC123 plasmid, between the UBQ10 promoter and a cassette containing 3×Flag, followed by the NtDRM2 Methyltransferase domain (DRM2-MTase). The resulting construct was transformed in agrobacterium and wild type Col0 Arabidopsis plants were transformed by the floral dip method.

[0723] One of the ZFP expression cassettes is called pMDC_UBQ10::SUP-ZF1_3×Flag_DRM2_MTase. This cassette contains a UBQ10 promoter, SUP1-ZF1, 3×FLAG, and DRM2-MTase. The sequence of this cassette is presented in SEQ ID NO: 843. The amino acid sequence of the fusion protein encoded by this cassette (SUP-ZF1_DRM2-MTase) is presented in SEQ ID NO: 844. The amino acid sequence of SUP-ZF1 is presented in SEQ ID NO: 845. The fusion protein includes an N-terminal SUP-ZF1, intervening 3×FLAG, and DRM2-MTase (C-terminal).

[0724] Another of the ZFP expression cassettes is called pMDC_UBQ10::SUP-ZF3_3×Flag_DRM2-MTase. This cassette contains a UBQ10 promoter, SUP1-ZF3, 3×FLAG, and DRM2-MTase. The sequence of this cassette is presented in SEQ ID NO: 846. The amino acid sequence of the fusion protein encoded by this cassette (SUP-ZF3_DRM2-MTase) is presented in SEQ ID NO: 847. The amino acid sequence of SUP-ZF3 is presented in SEQ ID NO: 848. The fusion protein includes an N-terminal SUP-ZF3, intervening 3×FLAG, and DRM2-MTase (C-terminal).

### Results

[0725] DNA methylation of 10 individual transgenic T1 plants was analyzed by McrBC PCR.

[0726] DNA was extracted using a CTAB-based method and digested using the DNA methylation sensitive restriction enzyme McrBC that specifically digests methylated DNA. Digested and undigested DNA was amplified by real-time qPCRs using oligos designed to amplify the ZFP targeted regions. A low Digested/Non-digested ratio indicates the presence of methylation at the targeted loci. A control region that is not targeted by the ZFP was used as a negative control. The results indicate methylation at the target region using both SUP-ZF1 and SUP-ZF3 when either is individually fused to DRM2-Mtase (FIG. 26).

[0727] The presence of methylation at the SUPERMAN gene was also confirmed using whole genome bisulfite sequencing. DNA from leaves of the different lines expressing the respective ZFP fused to NtDRM2-MTase was extracted by a CTAB-method. Libraries for whole genome bisulfite sequencing were prepared using the Ovation Ultralow methyl-seq kit (Nugen) and sequenced using the HiSeq 2000 platform following manufacturer instructions (Illumina) at a length of 50 bp. Bisulfite-Seq (BS-Seq) reads were aligned to the TAIR10 version of the Arabidopsis thaliana reference genome using BS-seeker. For BS-Seq up to 2 mismatches were allowed and only uniquely mapped reads were used. The results indicate methylation at the target region using both SUP-ZF1 and SUP-ZF3 when either is individually fused to DRM2-Mtase (FIG. 27).

### Example 11: DNA Methylation Targeting at FWA with Various Factors

[0728] This Example describes additional data showing DNA methylation targeting at FWA with various factors.

### Materials, Methods, and Results

[0729] DNA from leaves of the different lines expressing ZF108 fused to various factors was extracted by a CTAB-method. Libraries for whole genome bisulfite sequencing were prepared using the Ovation Ultralow methyl-se kit (Nugen) and sequenced using the HiSeq 2000 platform following manufacturer instructions (Illumina) at a length of 50 bp. Bisulfite-Seq (BS-Seq) reads were aligned to the TAIR10 version of the Arabidopsis thaliana reference genome using BS-seeker. For BS-Seq up to 2 mismatches were allowed and only uniquely mapped reads were used.

[0730] Results are presented in FIG. 28. The results demonstrate that a number of proteins, including NRPD1, RDR2, MORC1, RDM1, DMS3, NRPD2, DRM2-MTase, and SssI, when fused to the ZF108 zinc finger, were able to target methylation at the FWA promoter. ZF108 chromatin immunoprecipitation demonstrates that ZF108 was bound at the targeted region of the FWA locus.

### Example 12: Off-Targets of ZF108

[0731] This Example illustrates additional regions of the Arabidopsis genome targeted by the ZF108 artificial zinc finger.

### Materials and Methods

[0732] DNA from leaves of different lines expressing ZF108 fused to various factors was extracted by a CTAB-method. Libraries for whole genome bisulfite sequencing were prepared using the Ovation Ultralow methyl-seq kit (Nugen) and sequenced using the HiSeq 2000 platform following manufacturer instructions (Illumina) at a length of 50 bp. Bisulfite-Seq (BS-Seq) reads were aligned to the TAIR10 version of the Arabidopsis thaliana reference genome using BS-seeker. For BS-Seq up to 2 mismatches were allowed and only uniquely mapped reads were used.

### Results

[0733] The results demonstrate DNA methylation targeting at a second location in the Arabidopsis genome with two sequences very similar to the ZF108 target locus. Both Col0 and fwa-4 plants have very little pre-existing methylation at this site, but the ZF108 fusion protein containing plants contain methylation in all three sequence contexts (FIG. 29). A ChIP-seq analysis of the ZF108 zinc finger fused to either the HA tag or a DMS3-FLAG tag shows enrichment of ZF108 at both FWA and this second location with sequences related to the zinc finger binding site (FIG. 30).

### Example 13: DNA Methylation-Independent Silencing of Targeted Loci

[0734] This Example describes the ability of ZF108 fusions to DMS3, HDA6, JMJ14, SHH2 and SUVR2 to silence FWA and affect flowering time in a DNA methylation-independent manner.

### Materials, Methods, and Results

[0735] Plants expressing ZF108 fused to DMS3, HDA6, JMJ14 or SHH2 (described in Example 6) were transformed into either fwa-4 or fwa-4 drm1 drm2 triple mutants, defective in the two de-novo methyltransferases in Arabidopsis and, therefore, incapable of de-novo methylating any sequences. Importantly, plants expressing the different ZF108 fusions in both mutant backgrounds were able to cause an early flowering phenotype, suggesting that they were able to repress FWA expression and cause early flowering, even in the absence of DNA methylation (fwa-4×drm1/2) (FIG. 31, FIG. 32, FIG. 33, and FIG. 34).

[0736] To further validate that this effect on flowering time was happening in the absence of DNA methylation, BS—PCR and whole genome bisulfite sequencing were performed as described in previous examples (FIG. 35 and FIG. 36). The results indicate that, indeed, DNA methylation was absent at the FWA promoter in plants expressing the different fusions in both mutant backgrounds, fwa-4 or fwa-4×drm1/2, confirming that these factors can cause early flowering in the absence of DNA methylation. The ZF108-SUVR2 plants also showed no DNA methylation at the FWA gene (FIG. 36), suggesting that SUVR2 is also capable of causing silencing of FWA in the absence of DNA methylation.

[0737] In Example 6 herein, it was found that HDA6, JMJ14, SHH2, and SUVR2 did, in that particular case, cause methylation of FWA. However, as elaborated upon in this Example, it has also been found that this induction of methylation by these factors does not always occur. Thus, it appears that these factors can in some cases trigger methylation of FWA, but in most cases do not. Regardless, the data demonstrate that these factors can induce silencing of FWA when targeted to that locus, even in the absence of inducing DNA methylation at that locus.

### Example 14: Heritable Silencing Induced by ZF108-SssI

[0738] This Example describes the inheritance of DNA methylation and FWA silencing and early flowering in the absence of the ZF108-SssI transgene once it has genetically segregated out.

### Materials and Methods

[0739] DNA from T2 and T3 ZF+ and ZF− plants was extracted by a CTAB-based method and libraries for whole genome bisulfite sequencing were prepared using the Ovation Ultralow methyl-seq kit. Libraries were sequenced using the HiSeq 2000 platform following manufacturer instructions (Illumina) at a length of 50 bp. Bisulfite-Seq (BS-Seq) reads were aligned to the TAIR10 version of the Arabidopsis thaliana reference genome using BS-seeker. For BS-Seq up to 2 mismatches were allowed and only uniquely mapping reads were used.

### Results

[0740] fwa-4 plants were transformed with the ZF108-SssI transgene. T1 plants were selfed to produce the T2 generation, and individual plants that still contained the transgene (ZF+) or had segregated it out (ZF−) were selected. The T3 progeny of these plants were grown and flowering time was scored and compared to controls, Col0 and fwa-4. The results show that DNA methylation triggered by ZF108-SssI, and the accompanying transition to early flowering, is maintained even when the transgene is segregated out (FIG. 37, FIG. 38, and FIG. 39). In addition, CG methylation which had been established by ZF108-SssI at many other regions of the genome were also maintained after the ZF108-SssI transgene was segregated away.

[0741] The ability of SssI to cause CG methylation throughout the genome as described herein may have applications in restoring methylation in plants. For example, plants that undergo the tissue culture processes normally involved in plant transformation show losses of DNA methylation at hundreds of locations. These losses are heritable, and can cause changes in gene expression (Stroud et al., 2013). It is possible that ZF108-SssI could be used to restore methylation in plants that have undergone tissue culture.

### Example 15: Zinc Finger Targeting of MBD9 to FWA

[0742] This Example describes the use of MBD9 fused to ZF108 to repress expression of the FWA gene.

### Materials and Methods

[0743] A genomic construct of MBD9, including a 1 Kb promoter region, was cloned into pENTR/D plasmid. Then, a cassette containing 3×Flag and ZF108 was cloned downstream of MBD9 and the resulting construct was transferred into a modified pEG302 binary vector. This construct was transformed into Agrobacterium and introduced in fwa-4 plants by the floral dip method.

[0744] The nucleic acid sequence of the expression cassette, MBD9_3×Flag_ZF108, is set forth in SEQ ID NO: 849. The amino acid sequence of the fusion protein encoded by this cassette is set forth in SEQ ID NO: 850.

[0745] T1 transgenic plants, together with Col0 and fwa-4 controls, were grown and flowering time was scored by counting the number of total leaves.

### Results

[0746] ZF108-MBD9 plants displayed an early flowering phenotype in 6 out of 38 tested plants (Table 15A). This indicates that MBD9 is able to cause silencing of FWA.

TABLE 15A
Flowering Time Results

| | early flowering | late flowering |
|---|---|---|
| MBD9-ZF | 6 | 32 |

[0747] In order to determine if the FWA promoter is being methylated in these lines, an McrBC PCR experiment was done using the methylation sensitive restriction enzyme McrBC. Briefly, genomic DNA from Col0, fwa-4 and 7 independent T1 lines expressing MBD9-ZF, 6 of them showing an early flowering phenotype, was digested with McrBC for 4 h at 37° C. The same amount of DNA was mock-digested (no restriction enzyme) under the same conditions. qPCR using the resulting samples was performed with oligos that amplify the FWA promoter, or a control region that, similar to FWA promoter, shows methylation in Col0 but not in fwa-4. Then, the ratio between digested and undigested samples was calculated. The results clearly indicate that the lines expressing MBD9-ZF do not show methylation at the FWA promoter (FIG. 40). MBD9 is thus able to cause silencing of FWA in the absence of DNA methylation.

### Example 16: Targeting of DRM2-MTase to the SUPERMAN Locus Using the SunTag System

[0748] This Example demonstrates the targeting of DRM2-MTase to the SUPERMAN locus using the SunTag system and the subsequent establishment of DNA methylation and silencing.

### Materials and Methods

[0749] Materials and Methods used in this Example are similar to the Materials and Methods described in Example 9. One notable difference is that two different U6-driven guide RNAs are used to target SUPERMAN, as opposed to targeting FWA as in Example 9.

[0750] For targeting SUPERMAN, two sgRNA expression cassettes were constructed and were present on the same binary vector described in Example 9. Each cassette was driven by the U6 promoter (SEQ ID NO: 860). The two protospacer sequences are presented in SEQ ID NO: 851 and SEQ ID NO: 852. The sgRNA backbone sequence is presented in SEQ ID NO: 853.

### Results

[0751] Following confirmation that the SunTag DRM2-MTase expression system components were being expressed and localized to the nucleus, various plant lines were evaluated to assess targeting of DRM2-MTase to SUPERMAN and induction of methylation. Various T1 lines housing the SunTag DRM2-MTase construct that contains the two guides (which target the promoter region of SUPERMAN) were evaluated for methylation levels at SUPERMAN's promoter region.

[0752] Multiple plants from multiple independent T1 SunTag DRM2-MTase+sgRNA1/2 lines exhibited increased CHH and CHG methylation at SUPERMAN's promoter region as compared to Col controls. FIG. 42 and FIG. 43 show examples of the increased CHH and CHG methylation, respectively. As shown in the figures, there is no methylation present in the controls, and the SunTag construct successfully introduces methylation at the targeted sites.

[0753] qRT-PCR was performed to check for repression of SUPERMAN transcripts in flowers of T1 lines as compared to Col controls. As shown in FIG. 44, line 1 showed downregulation of SUPERMAN expression by 2-fold as compared to the control. Since full gene silencing by DNA methylation often takes multiple sexual generations, without wishing to be bound by theory, it is thought that further silencing of SUPERMAN will occur in selfed progeny of these plants.

[0754] Overall, the results suggest that SunTag DRM2-MTase lines containing 2 guides targeting SUPERMAN are able to successfully guide dCas9 to the SUPERMAN locus, and that DRM2-MTase is then able to induce methylation of SUPERMAN and gene silencing.

### Example 17: Targeting of DNMT3A-3L to the FWA Locus Using the SunTag System

[0755] This Example demonstrates the targeting of the DNMT3A catalytic domain fused to the C-terminal domain of DNMT3L to the FWA locus using the SunTag system and the subsequent establishment of DNA methylation and silencing. Transforming Arabidopsis fwa epiallele plants with the SunTag construct led to methylation of the FWA promoter.

### Materials and Methods

[0756] Materials and Methods used in this Example are similar to the Materials and Methods described in Example 9. One notable difference is that the DNMT3A-3L fusion is being used, as opposed to DRM2-MTase as described in Example 9. For targeting FWA, U6 driven sgRNA4 was used as described in Example 9.

[0757] The construct in this Example contained a DNMT3A-3L fusion. The catalytic methyltransferase domain of the DNMT3A protein and the C-terminal domain of the 3L protein were fused (DNMT3A-3L) and used to replace VP64 with a methylation effector. dCas9, single chain variable fragment (scFv) antibodies, and guide RNAs (gRNA) were cloned into a binary vector using In-Fusion cloning, which were then used for floral dipping in Arabidopsis thaliana.

[0758] The UBQ10 promoter preceding dCas9-GCN4×10 was followed by an Omega translational enhancer sequence. dCas9-GCN4×10 and scFv-GCN4-sfGFP-DNMT3A-3L-GB1-NLS cassettes were separated by a plant-specific TBS insulator sequence. gRNA expression was controlled by the Pol III specific U6 promoter and termination was controlled by the Pol III termination sequence.

[0759] The dCas9 expression cassette contained UBQ10_Omega RBC_dCas9_1×HA_NLSNLS_flexible linker_GCN4×10. The nucleotide sequence of this cassette is presented in SEQ ID NO: 854. The fusion protein encoded from this nucleotide sequence (dCas9_1×HA_NLSNLS_flexible linker_GCN4×10) is presented in SEQ ID NO: 855.

[0760] The scFv expression cassette contained UBQ10_scFv_sfGFP_unique BsiWI site_glycine linker_DNMT3A (catalytic)-DNMT3L (C-terminal)_glycine linker_NLS_BsiWI site_GB1_REX NLS_NOS terminator. The nucleotide sequence of this cassette is presented in SEQ ID NO: 856. The fusion protein encoded from this nucleotide sequence (scFv_sfGFP_glycine linker_DNMT3A (catalytic)-DNMT3L (C-terminal)_glycine linker_NLS_GB1_REX NLS) is presented in SEQ ID NO: 857.

[0761] The gRNA was as follows: U6 promoter_protospacer #4_gRNA backbone_Pol III terminator. The nucleotide sequence of this gRNA is presented in SEQ ID NO: 858.

### Results

[0762] Following confirmation that the SunTag DNMT3A-3L expression system components were being expressed and localized to the nucleus as described in Example 9, various plant lines were evaluated for whether this system could target DNMT3A-3L to FWA and induce methylation. Various T1 lines housing the SunTag DNMT3A-3L construct that contains sgRNA4 (which targets the promoter of FWA) were evaluated for methylation levels at FWA's promoter region.

[0763] Multiple plants from multiple independent T1 SunTag DNMT3A-3L+sgRNA4 lines exhibited increased CG methylation at FWA's promoter region as compared to fwa epiallele controls plants. FIG. 45 shows examples of the increased CG methylation. In fwa-4, an epimutation results in loss of methylation from the FWA promoter. As shown in FIG. 45, there is no methylation present in the control, and the SunTag construct successfully introduces methylation at the targeted site. Two out of eight lines tested (the same two shown in FIG. 45), also exhibited a slightly early flowering phenotype, indicating partial silencing of FWA.

[0764] Overall, the results suggest that SunTag DNMT3A-3L lines containing sgRNA4 targeting FWA are able to successfully guide dCas9 to the FWA locus, and that DNMT3A-3L is then able to induce methylation of FWA. This methylation targeting was not as efficient as that seen in SunTag DRM2-MTase plants. Without wishing to be bound by theory, it is thought that increasing the number of gRNAs may increase the efficiency of methylation targeting by SunTag DNMT3A-3L.

### Example 18: Additional Information

[0765] Transgenic T2 plants expressing the MS2-DRM2-MTase construct and different gRNAs targeting the FWA promoter (gRNA5, gRNA8 and gRNA3-gRNA14-gRNA17) (described in Example 3) were analyzed for flowering time, together with fwa-4 and Col0 controls. All the transgenic lines showed late flowering in T1 and T2 suggesting that these constructs were ineffective in causing FWA silencing. Methylation levels of different transgenic lines expressing dCas9 and MS2-MTase proteins were analyzed by whole genome bisulfite sequencing. Results showed no methylation at the FWA promoter.

[0766] T1 and T2 transgenic plants expressing straight fusions of dCas9 to DMS3 or DRM2-MTase together with gRNAs targeting the FWA promoter (described in Example 1), were analyzed for flowering time and DNA methylation by whole genome bisulfite sequencing. None of the lines showed early flowering or DNA methylation at the FWA promoter suggesting that these constructs were not effective in causing silencing or DNA methylation.

[0767] A fragment containing hdSpdCas9 fused to DNMT3A and DNMT3L was amplified from the hdSpCas9-3a3-3×Flag plasmid (Albert Jeltsch's lab) and cloned into a modified pMDC123 plasmid between the Arabidopsis UBQ10 promoter and the NOS terminator. Two gRNAs cassettes, each containing a U6 promoter and a gRNA targeting the FWA promoter were cloned in tandem upstream of the UBQ10 promoter. The resulting plasmid was introduced into agrobacterium and fwa-4 plants were transformed by the floral dip method. Transgenic plants were scored for expression of the transgene and flowering time together with fwa-4 and Col0 controls. All the lines expressing the transgene were late flowering. Methylation of two independent T1 plants expressing the transgene was analyzed by whole-genome bisulfite sequencing. Results showed no methylation at FWA promoter. These results suggest that these constructs were ineffective in triggering silencing and methylation of FWA.

[0768] A CG-specific methyltransferase from Mycoplasma penetrans (MpeI) was plant-codon optimized and gene synthesized (IDT technologies). The resulting fragment was cloned into a modified pMDC123 plasmid downstream of a cassette containing UBQ10 promoter, ZF108 and 3×Flag. The resulting plasmid was transformed into Agrobacterium and introduced into fwa-4 plants by the floral dip method. 47 transgenic T1 plants were analyzed for flowering time and all showed a late flowering phenotype, indicating that this construct was not effective in inducing gene silencing.

### REFERENCES

[0769] Law, J. A. & Jacobsen, S. E. Establishing, maintaining and modifying DNA methylation patterns in plants and animals. Nat Rev Genet 11, 204-220 (2010).
[0770] Haag, J. R. & Pikaard, C. S. Multisubunit RNA polymerases IV and V: purveyors of non-coding RNA for plant gene silencing. Nat Rev Mol Cell Biol 12, 483-492, doi:10.1038/nrm3152 (2011).
[0771] Law, J. A., Vashisht, A. A., Wohlschlegel, J. A. & Jacobsen, S. E. SHH1, a Homeodomain Protein Required for DNA Methylation, As Well As RDR2, RDM4, and Chromatin Remodeling Factors, Associate with RNA Polymerase IV. PLoS Genet 7, e1002195, doi:10.1371/journal.pgen.1002195 (2011).
[0772] Liu, J. et al. An atypical component of RNA-directed DNA methylation machinery has both DNA methylation-dependent and -independent roles in locus-specific transcriptional gene silencing. Cell Res 21, 1691-1700, doi:10.1038/cr.2011.173 (2011).
[0773] Olovnikov, I., Aravin, A. A. & Fejes Toth, K. Small RNA in the nucleus: the RNA-chromatin ping-pong. Curr Opin Genet Dev 22, 164-171, doi:10.1016/j.gde.2012.01.002 (2012).
[0774] Mosher, R. A., Schwach, F., Studholme, D. & Baulcombe, D. C. PolIVb influences RNA-directed DNA methylation independently of its role in siRNA biogenesis. Proc Natl Acad Sci USA 105, 3145-3150 (2008).
[0775] Zhang, X., Henderson, I. R., Lu, C., Green, P. J. & Jacobsen, S. E. Role of RNA polymerase IV in plant small RNA metabolism. Proc Natl Acad Sci USA 104, 4536-4541 (2007).
[0776] Cokus, S. J. et al. Shotgun bisulphite sequencing of the Arabidopsis genome reveals DNA methylation patterning. Nature 452, 215-219 (2008).
[0777] Cao, X. et al. Role of the DRM and CMT3 methyltransferases in RNA-directed DNA methylation. Curr Biol 13, 2212-2217 (2003).
[0778] Du, J. et al. Dual Binding of Chromomethylase Domains to H3K9me2-containing Nucleosomes Directs DNA Methylation in Plants. Cell Accepted (2012).
[0779] Zhong, X. et al. DDR complex facilitates global association of RNA polymerase V to promoters and evolutionarily young transposons. Nat Struct Mol Biol, doi:10.1038/nsmb.2354 (2012).
[0780] Mukherjee, K., Brocchieri, L. & Burglin, T. R. A comprehensive classification and evolutionary analysis of plant homeobox genes. Mol Biol Evol 26, 2775-2794 (2009).
[0781] Cedar, H. & Bergman, Y. Linking DNA methylation and histone modification: patterns and paradigms. Nat Rev Genet 10, 295-304 (2009).
[0782] Zhang, X., Bernatavichute, Y. V., Cokus, S., Pellegrini, M. & Jacobsen, S. E. Genome-wide analysis of mono-, di- and trimethylation of histone H3 lysine 4 in Arabidopsis thaliana. Genome Biol 10, R62 (2009).
[0783] Bian, C. et al. Sgf29 binds histone H3K4me2/3 and is required for SAGA complex recruitment and histone H3 acetylation. EMBO J 30, 2829-2842, doi:10.1038/emboj.2011.193 (2011).
[0784] Holm, L. & Rosenstrom, P. Dali server: conservation mapping in 3D. Nucleic Acids Res 38, W545-549, doi:10.1093/nar/gkq366 (2010).
[0785] Nady, N. et al. Recognition of multivalent histone states associated with heterochromatin by UHRF1 protein. Journal of Biological Chemistry 286, 24300-24311, doi:10.1074/jbc.M111.234104 (2011).
[0786] Bernatavichute, Y. V., Zhang, X., Cokus, S., Pellegrini, M. & Jacobsen, S. E. Genome-wide association of histone H3 lysine nine methylation with CHG DNA methylation in Arabidopsis thaliana. PLoS ONE 3, e3156 (2008).
[0787] Taverna, S. D., Li, H., Ruthenburg, A. J., Allis, C. D. & Patel, D. J. How chromatin-binding modules interpret histone modifications: lessons from professional pocket pickers. Nat Struct Mol Biol 14, 1025-1040, doi: 10.1038/nsmb 1338 (2007).
[0788] Zhang, X. et al. Genome-wide high-resolution mapping and functional analysis of DNA methylation in arabidopsis. Cell 126, 1189-1201 (2006).
[0789] Zilberman, D. et al. Role of Arabidopsis ARGONAUTE4 in RNA-directed DNA methylation triggered by inverted repeats. Curr Biol 14, 1214-1220 (2004).
[0790] Xie, Z. et al. Genetic and functional diversification of small RNA pathways in plants. PLoS Biol 2, E104 (2004).
[0791] Li, C. F. et al. An ARGONAUTE4-containing nuclear processing center colocalized with Cajal bodies in Arabidopsis thaliana. Cell 126, 93-106 (2006).
[0792] Pontes, O. et al. The Arabidopsis chromatin-modifying nuclear siRNA pathway involves a nucleolar RNA processing center. Cell 126, 79-92 (2006).
[0793] Zilberman, D., Cao, X. & Jacobsen, S. E. ARGONAUTE4 control of locus-specific siRNA accumulation and DNA and histone methylation. Science 299, 716-719 (2003).
[0794] Adams, P. D., Afonine, P. V., Bunkoczi, G., Chen, V. B., Davis, I. W., Echols, N., Headd, J. J., Hung, L. W., Kapral, G. J., Grosse-Kunstleve, R. W., et al. (2010). PHENIX: a comprehensive Python-based system for macromolecular structure solution. Acta crystallographica Section D, Biological crystallography 66, 213-221.
[0795] Arita, K., Ariyoshi, M., Tochio, H., Nakamura, Y., and Shirakawa, M. (2008). Recognition of hemi-methylated DNA by the SRA protein UHRF1 by a base-flipping mechanism. Nature 455, 818-821.
[0796] Aufsatz, W., Mette, M. F., van der Winden, J., Matzke, A. J., and Matzke, M. (2002). RNA-directed DNA methylation in Arabidopsis. Proceedings of the National Academy of Sciences of the United States of America 99 Suppl 4, 16499-16506.
[0797] Aufsatz, W., Mette, M. F., Matzke, A. J. & Matzke, M. The role of MET1 in RNA-directed de novo and maintenance methylation of CG dinucleotides. Plant Molecular Biology 54, 793-804 (2004).
[0798] Avvakumov, G. V., Walker, J. R., Xue, S., Li, Y., Duan, S., Bronner, C., Arrowsmith, C. H., and Dhe-Paganon, S. (2008). Structural basis for recognition of hemi-methylated DNA by the SRA domain of human UHRF1. Nature 455, 822-825.
[0799] Bernatavichute, Y. V., Zhang, X., Cokus, S., Pellegrini, M., and Jacobsen, S. E. (2008). Genome-wide association of histone H3 lysine nine methylation with CHG DNA methylation in Arabidopsis thaliana. PloS one 3, e3156.
[0800] Black, J. C., Van Rechem, C., and Whetstine, J. R. (2012). Histone lysine methylation dynamics: establishment, regulation, and biological impact. Molecular cell 48, 491-507.
[0801] Bostick, M., Kim, J. K., Esteve, P. O., Clark, A., Pradhan, S., and Jacobsen, S. E. (2007). UHRF1 plays a role in maintaining DNA methylation in mammalian cells. Science 317, 1760-1764.
[0802] Brzeski, J., and Jerzmanowski, A. (2003). Deficient in DNA methylation 1 (DDM1) defines a novel family of chromatin-remodeling factors. The Journal of biological chemistry 278, 823-828.
[0803] Cao, X., and Jacobsen, S. E. (2002). Role of the arabidopsis DRM methyltransferases in de novo DNA methylation and gene silencing. Current biology: CB 12, 1138-1144.
[0804] Chan, S. W., Zhang, X., Bernatavichute, Y. V., and Jacobsen, S. E. (2006). Two-step recruitment of RNA-directed DNA methylation to tandem repeats. PLoS biology 4, e363.
[0805] Du, J., Zhong, X., Bernatavichute, Y. V., Stroud, H., Feng, S., Caro, E., Vashisht, A. A., Terragni, J., Chin, H. G., Tu, A., et al. (2012). Dual Binding of Chromomethylase Domains to H3K9me2-Containing Nucleosomes Directs DNA Methylation in Plants. Cell 151, 167-180.
[0806] Ebbs, M. L., and Bender, J. (2006). Locus-specific control of DNA methylation by the Arabidopsis SUVH5 histone methyltransferase. The Plant cell 18, 1166-1176.
[0807] El-Shami, M., Pontier, D., Lahmy, S., Braun, L., Picart, C., Vega, D., Hakimi, M. A., Jacobsen, S. E., Cooke, R., and Lagrange, T. (2007). Reiterated WG/GW motifs form functionally and evolutionarily conserved ARGONAUTE-binding platforms in RNAi-related components. Genes & development 21, 2539-2544.
[0808] Emsley, P., Lohkamp, B., Scott, W. G., and Cowtan, K. (2010). Features and development of Coot. Acta crystallographica Section D, Biological crystallography 66, 486-501.
[0809] Feng, S., Rubbi, L., Jacobsen, S. E., and Pellegrini, P. (2011). Determining DNA Methylation Profiles Using Sequencing. Methods in Molecular Biology 733, 223-238.
[0810] Finnegan, E. J., and Dennis, E. S. (1993). Isolation and identification by sequence homology of a putative cytosine methyltransferase from Arabidopsis thaliana. Nucleic acids research 21, 2383-2388.
[0811] Gouet, P., Courcelle, E., Stuart, D. I., and Metoz, F. (1999). ESPript: analysis of multiple sequence alignments in PostScript. Bioinformatics 15, 305-308.
[0812] Greenberg, M. V., Ausin, I., Chan, S. W., Cokus, S. J., Cuperus, J. T., Feng, S., Law, J. A., Chu, C., Pellegrini, M.,
[0813] Carrington, J. C., et al. (2011). Identification of genes required for de novo DNA methylation in Arabidopsis. Epigenetics: official journal of the DNA Methylation Society 6, 344-354.
[0814] Hashimoto, H., Horton, J. R., Zhang, X., Bostick, M., Jacobsen, S. E., and Cheng, X. (2008). The SRA domain of UHRF1 flips 5-methylcytosine out of the DNA helix. Nature 455, 826-829.
[0815] Jackson, J. P., Lindroth, A. M., Cao, X., and Jacobsen, S. E. (2002). Control of CpNpG DNA methylation by the KRYPTONITE histone H3 methyltransferase. Nature 416, 556-560.
[0816] Johnson, L. M., Bostick, M., Zhang, X., Kraft, E., Henderson, I., Callis, J., and Jacobsen, S. E. (2007). The SRA methyl-cytosine-binding domain links DNA and histone methylation. Current biology: CB 17, 379-384.
[0817] Johnson, L. M., Law, J. A., Khattar, A., Henderson, I. R., and Jacobsen, S. E. (2008). SRA-domain proteins required for DRM2-mediated de novo DNA methylation. PLoS genetics 4, e1000280.
[0818] Jones, P. A. (2012). Functions of DNA methylation: islands, start sites, gene bodies and beyond. Nature reviews Genetics 13, 484-492.
[0819] Kakutani, T. (1997). Genetic characterization of late-flowering traits induced by DNA hypomethylation mutation in Arabidopsis thaliana. The Plant journal: for cell and molecular biology 12, 1447-1451.
[0820] Kinoshita, Y., Saze, H., Kinoshita, T., Miura, A., Soppe, W. J., Koornneef, M., and Kakutani, T. (2007). Control of FWA gene silencing in Arabidopsis thaliana by SINE-related direct repeats. The Plant journal: for cell and molecular biology 49, 38-45.
[0821] Kolb, A. F., Coates, C. J., Kaminski, J. M., Summers, J. B., Miller, A. D., and Segal, D. J. (2005). Site-directed genome modification: nucleic acid and protein modules for targeted integration and gene correction. Trends in biotechnology 23, 399-406.
[0822] Kuhlmann, M., and Mette, M. F. (2012). Developmentally non-redundant SET domain proteins SUVH2 and SUVH9 are required for transcriptional gene silencing in Arabidopsis thaliana. Plant molecular biology.
[0823] Larkin, M. A., Blackshields, G., Brown, N. P., Chenna, R., McGettigan, P. A., McWilliam, H., Valentin, F., Wallace, I. M., Wilm, A., Lopez, R., et al. (2007). Clustal W and Clustal X version 2.0. Bioinformatics 23, 2947-2948.
[0824] Laskowski, R. A., Macarthur, M. W., Moss, D. S., and Thornton, J. M. (1993). PROCHECK: a program to check the stereochemical quality of protein structures. J Appl Crystallogr 26, 283-291.
[0825] Law, J. A., Ausin, I., Johnson, L. M., Vashisht, A. A., Zhu, J. K., Wohlschlegel, J. A., and Jacobsen, S. E. (2010). A protein complex required for polymerase V transcripts and RNA-directed DNA methylation in Arabidopsis. Current biology: CB 20, 951-956.
[0826] Law, J. A., and Jacobsen, S. E. (2010). Establishing, maintaining and modifying DNA methylation patterns in plants and animals. Nature reviews Genetics 11, 204-220.
[0827] Lindroth, A. M., Cao, X., Jackson, J. P., Zilberman, D., McCallum, C. M., Henikoff, S., and Jacobsen, S. E. (2001). Requirement of CHROMOMETHYLASE3 for maintenance of CpXpG methylation. Science 292, 2077-2080.
[0828] Lindroth, A. M., Shultis, D., Jasencakova, Z., Fuchs, J., Johnson, L., Schubert, D., Patnaik, D., Pradhan, S., Goodrich, J., Schubert, I., et al. (2004). Dual histone H3 methylation marks at lysines 9 and 27 required for interaction with CHROMOMETHYLASE3. The EMBO journal 23, 4286-4296.
[0829] Lister, R. et al. Highly integrated single-base resolution maps of the epigenome in Arabidopsis. Cell 133, 523-536 (2008).
[0830] Malagnac, F., Bartee, L., and Bender, J. (2002). An Arabidopsis SET domain protein required for maintenance but not establishment of DNA methylation. The EMBO journal 21, 6842-6852.
[0831] Otwinowski, Z., and Minor, W. (1997). Processing of X-ray diffraction data collected in oscillation mode. Methods Enzymol 276, 307-326.
[0832] Pelissier, T., and Wassenegger, M. (2000). A DNA target of 30 bp is sufficient for RNA-directed DNA methylation. RNA 6, 55-65.
[0833] Pikaard, C. S., Haag, J. R., Ream, T., and Wierzbicki, A. T. (2008). Roles of RNA polymerase IV in gene silencing. Trends in plant science 13, 390-397.
[0834] Pontier, D., Yahubyan, G., Vega, D., Bulski, A., Saez-Vasquez, J., Hakimi, M. A., Lerbs-Mache, S., Colot, V., and Lagrange, T. (2005). Reinforcement of silencing at transposons and highly repeated sequences requires the concerted action of two distinct RNA polymerases IV in Arabidopsis. Genes & development 19, 2030-2040.
[0835] Rajakumara, E., Law, J. A., Simanshu, D. K., Voigt, P., Johnson, L. M., Reinberg, D., Patel, D. J., and Jacobsen, S. E. (2011). A dual flip-out mechanism for 5mC recognition by the Arabidopsis SUVH5 SRA domain and its impact on DNA methylation and H3K9 dimethylation in vivo. Genes & development 25, 137-152.
[0836] Rincon-Arano, H., Halow, J., Delrow, J. J., Parkhurst, S. M., and Groudine, M. (2012). UpSET Recruits HDAC Complexes and Restricts Chromatin Accessibility and Acetylation at Promoter Regions. Cell 151, 1214-1228.
[0837] Segal, D. J., Beerli, R. R., Blancafort, P., Dreier, B., Effertz, K., Huber, A., Koksch, B., Lund, C. V., Magnenat, L., Valente, D., et al. (2003). Evaluation of a modular strategy for the construction of novel polydactyl zinc finger DNA-binding proteins. Biochemistry 42, 2137-2148.
[0838] Smith, E., and Shilatifard, A. (2010). The chromatin signaling pathway: diverse mechanisms of recruitment of histone-modifying enzymes and varied biological outcomes. Molecular cell 40, 689-701.
[0839] Soppe, W. J., Jacobsen, S. E., Alonso-Blanco, C., Jackson, J. P., Kakutani, T., Koornneef, M., and Peeters, A. J. (2000). The late flowering phenotype of fwa mutants is caused by gain-of-function epigenetic alleles of a homeodomain gene. Molecular cell 6, 791-802.
[0840] Springer, N. M., Napoli, C. A., Selinger, D. A., Pandey, R., Cone, K. C., Chandler, V. L., Kaeppler, H. F., and Kaeppler, S. M. (2003). Comparative analysis of SET domain proteins in maize and Arabidopsis reveals multiple duplications preceding the divergence of monocots and dicots. Plant physiology 132, 907-925.
[0841] Stroud, H., Greenberg, M. V., Feng, S., Bernatavichute, Y. V., and Jacobsen, S. E. (2013). Comprehensive analysis of silencing mutants reveals complex regulation of the Arabidopsis methylome. Cell 152, 352-364.
[0842] Wierzbicki, A. T., Haag, J. R., and Pikaard, C. S. (2008). Noncoding transcription by RNA polymerase Pol IVb/Pol V mediates transcriptional silencing of overlapping and adjacent genes. Cell 135, 635-648.
[0843] Wierzbicki, A. T., Ream, T. S., Haag, J. R., and Pikaard, C. S. (2009). RNA polymerase V transcription guides ARGONAUTE4 to chromatin. Nature genetics 41, 630-634.
[0844] Woo, H. R., Dittmer, T. A., and Richards, E. J. (2008). Three SRA-domain methylcytosine-binding proteins cooperate to maintain global CpG methylation and epigenetic silencing in Arabidopsis. PLoS genetics 4, e1000156.
[0845] Wu, H., Min, J., Lunin, V. V., Antoshenko, T., Dombrovski, L., Zeng, H., Allali-Hassani, A., Campagna-Slater, V., Vedadi, M., Arrowsmith, C. H., et al. (2010). Structural biology of human H3K9 methyltransferases. PloS one 5, e8570.
[0846] Zhang, X., Tamaru, H., Khan, S. I., Horton, J. R., Keefe, L. J., Selker, E. U., and Cheng, X. (2002). Structure of the Neurospora SET domain protein DIM-5, a histone H3 lysine methyltransferase. Cell 111, 117-127.
[0847] Zhang, X., Yang, Z., Khan, S. I., Horton, J. R., Tamaru, H., Selker, E. U., and Cheng, X. (2003). Structural basis for the product specificity of histone lysine methyltransferases. Molecular cell 12, 177-185.
[0848] Zhong, X., Hale, C. J., Law, J. A., Johnson, L. M., Feng, S., Tu, A., and Jacobsen, S. E. (2012). DDR complex facilitates global association of RNA polymerase V to promoters and evolutionarily young transposons. Nature structural & molecular biology.
[0849] Jinek M, et al. (2012) A programmable dual-RNA-guided DNA endonuclease in adaptive bacterial immunity. Science 337(6096):816-821.
[0850] Gilbert L A, et al. (2013) CRISPR-mediated modular RNA-guided regulation of transcription in eukaryotes. Cell 154(2):442-451.
[0851] Friedland A E, et al. (2013) Heritable genome editing in C. elegans via a CRISPR-CAS9 system. Nat Methods 10(8):741-743.
[0852] Bassett A R, Tibbit C, Ponting C P, & Liu J L (2013) Highly efficient targeted mutagenesis of Drosophila with the CRISPR-CAS9 system. Cell Rep 4(1):220-228.
[0853] Yang H, et al. (2013) One-step generation of mice carrying reporter and conditional alleles by CRISPR/Cas-mediated genome engineering. Cell 154(6):1370-1379.
[0854] Cong L, et al. (2013) Multiplex genome engineering using CRISPR/Cas systems. Science 339(6121):819-823.
[0855] Jiang W, et al. (2013) Demonstration of CRISPR-CAS9/sgRNA-mediated targeted gene modification in Arabidopsis, tobacco, sorghum and rice. Nucleic Acids Res 41(20):e188.
[0856] Feng Z, et al. (2013) Efficient genome editing in plants using a CRISPR/Cas system. Cell Res 23(10):1229-1232.
[0857] Li J F, et al. (2013) Multiplex and homologous recombination-mediated genome editing in Arabidopsis and Nicotiana benthamiana using guide RNA and CAS9. Nature biotechnology 31(8):688-691.
[0858] Sugano S S, et al. (2014) CRISPR-CAS9 Mediated Targeted Mutagenesis in the Liverwort Marchantia polymorpha L. Plant & cell physiology.
[0859] Upadhyay S K, Kumar J, Alok A, & Tuli R (2013) RNA-Guided Genome Editing for Target Gene Mutations in Wheat. G3 (Bethesda, Md.) 3(12):2233-2238.
[0860] Puchta H & Fauser F (2013) Synthetic nucleases for genome engineering in plants: prospects for a bright future. The Plant journal: for cell and molecular biology.
[0861] Belhaj K, Chaparro-Garcia A, Kamoun S, & Nekrasov V (2013) Plant genome editing made easy: targeted mutagenesis in model and crop plants using the CRISPR/Cas system. Plant methods 9(1):39.
[0862] Miao J, et al. (2013) Targeted mutagenesis in rice using CRISPR-Cas system. Cell Res 23(10):1233-1236.
[0863] Mao Y, et al. (2013) Application of the CRISPR-Cas system for efficient genome engineering in plants. Molecular plant 6(6):2008-201.
[0864] Xie K & Yang Y (2013) RNA-guided genome editing in plants using a CRISPR-Cas system. Molecular plant 6(6):1975-1983.
[0865] Shan Q, et al. (2013) Targeted genome modification of crop plants using a CRISPR-Cas system. Nature biotechnology 31(8):686-688.
[0866] Wiedenheft B, Sternberg S H, & Doudna J A (2012) RNA-guided genetic silencing systems in bacteria and archaea. Nature 482(7385):331-338.
[0867] Deltcheva E, et al. (2011) CRISPR RNA maturation by trans-encoded small RNA and host factor RNase III. Nature 471(7340):602-607.
[0868] Qi L S, et al. (2013) Repurposing CRISPR as an RNA-guided platform for sequence-specific control of gene expression. Cell 152(5):1173-1183.
[0869] Mali P, et al. (2013) CAS9 transcriptional activators for target specificity screening and paired nickases for cooperative genome engineering. Nature biotechnology 31(9):833-838.
[0870] Genetic Engineering and Chemical Conjugation of Potato Virus X Methods in Molecular Biology Volume 1108, 2014, pp 3-21.
[0871] Flexibility between the protease and helicase domains of the dengue virus NS3 protein conferred by the linker region and its functional implications. J Biol Chem. 2010 Jun. 11; 285(24):18817-27.
[0872] BglBricks: A flexible standard for biological part assembly J Biol Eng. 2010 Jan. 20; 4(1):1. doi: 10.1186/1754-1611-4-1.
[0873] Engineering peptide linkers for scFv immunosensors Anal Chem. 2008 Mar. 15; 80(6):1910-7. doi: 10.1021/ac7018624. Epub 2008 Feb. 22.
[0874] Chen et al., Fusion protein linkers: Property, design and functionality. Volume 65, Issue 10, 15 Oct. 2013, Pages 1357-1369.
[0875] Mali et al., Cas9 as a versatile tool for engineering biology. Nature Methods, 2013.
[0876] Hartoon Baazim Thesis, “RNA-guided Transcriptional Regulation in Plants via dCas9 Chimeric Proteins.” King Abdullah University of Science and Technology. Thuwal, Kingdom of Saudi Arabia. May, 2014
[0877] Swiech et al. In vivo interrogation of gene function in the mammalian brain using CRISPR-CAS9. Nature Biotechnology, Vol 33, Number 1. January 2015.
[0878] Wu et al. Genome-wide binding of the CRISPR endonuclease Cas9 in mammalian cells. Nature Biotechnology, Vol 32, Number 7. July 2014.
[0879] Esvelt et al. Orthogonal Cas9 proteins for RNA-guided gene regulation and editing. Nature Methods. November 2013.
[0880] Zalatan et al. Engineering Complex Synthetic Transcriptional Programs with CRISPR RNA Scaffolds. Cell 160, 339-350, Jan. 15, 2015.
[0881] Konermann et al. Genome-scale transcriptional activation by an engineered CRISPR-CAS9 complex. Nature, Vol 517, page 583. Jan. 29, 2015.
[0882] Jinek et al. A Programmable Dual-RNA-Guided DNA Endonuclease in Adaptive Bacterial Immunity. Science, Vol 337. Aug. 17, 2012.
[0883] van der Oost et al. Unravelling the structural and mechanistic basis of CRISPR-Cas systems. Nature Reviews, Volume 12. July 2014.
[0884] Gilbert et al. Genome-Scale CRISPR-Mediated Control of Gene Repression and Activation. Cell 159, 647-661, Oct. 23, 2014.
[0885] Tanenbaum et al. A Protein-Tagging System for Signal Amplification in Gene Expression and Fluorescence Imaging. Cell 159, 635-646, Oct. 23, 2014.
[0886] Binz et al., 2004, High-affinity binders selected from designed ankyrin repeat protein libraries. Nat. Biotechnol. 22, 575-582.
[0887] Xie, X et al, Boosting CRISPR/Cas9 multiplex editing capability with the endogenous tRNA-processing system. 2015, Proc Natl Acad Sci USA. 2015 Mar. 17; 112(11):3570-5
[0888] Johnson et al (2008), SRA-Domain Proteins Required for DRM2-Mediated De Novo DNA Methylation. PLoS Genet 4(11): e1000280. doi:10.1371/journal.pgen. 1000280
[0889] Kang H G, Klessig D F. The involvement of the Arabidopsis CRT1 ATPase family in disease resistance protein-mediated signaling. Plant Signal Behav. 2008; 3(9):689-690
[0890] Kang H G, Kuhl J C, Kachroo P, Klessig D F. CRT1, an Arabidopsis ATPase that interacts with diverse resistance proteins and modulates disease resistance to turnip crinkle virus. Cell Host Microbe. 2008; 3(1):48-57.
[0891] Kang H G1, Oh C S, Sato M, Katagiri F, Glazebrook J, Takahashi H, Kachroo P, Martin G B, Klessig D F. Endosome-associated CRT1 functions early in resistance gene-mediated defense signaling in Arabidopsis and tobacco. Plant Cell. 2010; 22(3):918-936.
[0892] Kang H G1, Hyong W C, von Einem S, Manosalva P, Ehlers K, Liu P P, Buxa S V, Moreau M, Mang H G, Kachroo P, Kogel K H, Klessig D F. CRT1 is a nuclear-translocated MORC endonuclease that participates in multiple levels of plant immunity. Nat Commun. 2012; 3:1297.
[0893] Moissiard G, et al. MORC family ATPases required for heterochromatin condensation and gene silencing. Science. 2012; 336(6087):1448-1451.
[0894] Moissiard G, Bischof S, Husmann D, Pastor W A, Hale C J, Yen L, Stroud H, Papikian A, Vashisht A A, Wohlschlegel J A, Jacobsen S E.
[0895] Transcriptional gene silencing by Arabidopsis microrchidia homologues involves the formation of heteromers. Proc Natl Acad Sci USA. 2014 May 20; 111(20):7474-9. doi: 10.1073/pnas.1406611111.
[0896] Liu Z W, Shao C R, Zhang C J, Zhou J X, Zhang S W, Li L, Chen S, Huang H W, Cai T, He X J. The SET domain proteins SUVH2 and SUVH9 are required for Pol V occupancy at RNA-directed DNA methylation loci. PLoS Genet. 2014 January; 10(1):e1003948. doi: 10.1371/journal.pgen. 1003948.
[0897] Segal E, et al. (2003) Module networks: identifying regulatory modules and their condition-specific regulators from gene expression data. Nat Genet 34(2):166-176.
[0898] Kolb A F, et al. (2005) Site-directed genome modification: nucleic acid and protein modules for targeted integration and gene correction. Trends in biotechnology 23(8):399-406.
[0899] Johnson L M, et al. (2014) SRA- and SET-domain-containing proteins link RNA polymerase V occupancy to DNA methylation. Nature 507(7490):124-128.
[0900] Hume Stroud, Bo Ding, Stacey A Simon, Suhua Feng, Maria Bellizzi, Matteo Pellegrini, Guo-Liang Wang, Blake C Meyers, Steven E Jacobsen. (2013) Plants regenerated from tissue culture contain stable epigenome changes in rice. eLife, 2:c00354. DOI: 10.7554/cLifc.00354.

What is claimed is:

1. A method for reducing expression of one or more target nucleic acids in a plant, comprising:
(a) providing a plant comprising:
a recombinant nucleic acid encoding a recombinant polypeptide comprising a nuclease-deficient CAS9 polypeptide (dCAS9) or fragment thereof and a polypeptide selected from the group consisting of an SHH1 polypeptide or fragment thereof, an SHH2 polypeptide or fragment thereof, an AGO4 polypeptide or fragment thereof, an HDA6 polypeptide or fragment thereof, an NRPD1 polypeptide or fragment thereof, a JMJ14 polypeptide or fragment thereof, an RDR2 polypeptide or fragment thereof, an NRPD2A/NRPE2 polypeptide or fragment thereof, an NRPB3/NRPD3/NRPE3A polypeptide or fragment thereof, an NRPE3B polypeptide or fragment thereof, an NRPB11/NRPD11/NRPE11 polypeptide or fragment thereof, an NRPB10/NRPD10/NRPE10 polypeptide or fragment thereof, an NRPB12/NRPD12/NRPE12 polypeptide or fragment thereof, an NRPB6A/NRPD6A/NRPE6A polypeptide or fragment thereof, an NRPB6B/NRPD6B/NRPE6B polypeptide or fragment thereof, an NRPB8A/NRPE8A polypeptide or fragment thereof, an NRPB8B/NRPD8B/NRPE8B polypeptide or fragment thereof, an NRPE5 polypeptide or fragment thereof, an NRPD4/NRPE4 polypeptide or fragment thereof, an NRPE7 polypeptide or fragment thereof, an NRPD7 polypeptide or fragment thereof, an NRPB5/NRPD5 polypeptide or fragment thereof, an NRPB9A/NRPD9A/NRPE9A polypeptide or fragment thereof, an NRPB9B/NRPD9B/NRPE9B polypeptide or fragment thereof, an ATRX polypeptide or fragment thereof, a MOM1 polypeptide or fragment thereof, a MORC1 polypeptide or fragment thereof, an SssI polypeptide or fragment thereof, a DRM2-MTase polypeptide or fragment thereof, a DNMT3A polypeptide or fragment thereof, a DNMT3L polypeptide or fragment thereof, an MBD9 polypeptide or fragment thereof, a SUVH2 polypeptide or a fragment thereof, a SUVH9 polypeptide or a fragment thereof, a DMS3 polypeptide or a fragment thereof, a MORC6 polypeptide or a fragment thereof, a SUVR2 polypeptide or a fragment thereof, a DRD1 polypeptide or a fragment thereof, an RDM1 polypeptide or a fragment thereof, a DRM3 polypeptide or a fragment thereof, a DRM2 polypeptide or a fragment thereof, and an FRG polypeptide or a fragment thereof; and
a crRNA and a tracrRNA, or fusions thereof;
(b) growing the plant under conditions whereby the recombinant nucleic acid is expressed and whereby the recombinant polypeptide is targeted to the one or more target nucleic acids, thereby reducing expression of the one or more target nucleic acids.

2. The method of claim 1, wherein the recombinant polypeptide interacts with an RNA polymerase.

3. The method of claim 2, wherein the RNA polymerase is RNA polymerase IV or RNA polymerase V.

4. The method of any one of claims 1-3, wherein the recombinant polypeptide induces RNA-directed DNA methylation.

5. The method of any one of claims 1-4, wherein the one or more target nucleic acids are endogenous nucleic acids.

6. The method of any one of claims 1-4, wherein the one or more target nucleic acids are heterologous nucleic acids.

7. The method of any one of claims 1-6, wherein expression of the one or more target nucleic acids is silenced.

8. A recombinant nucleic acid which encodes a recombinant polypeptide comprising a nuclease-deficient CAS9 polypeptide (dCAS9) and a polypeptide selected from the group consisting of an SHH1 polypeptide or fragment thereof, an SHH2 polypeptide or fragment thereof, an AGO4 polypeptide or fragment thereof, an HDA6 polypeptide or fragment thereof, an NRPD1 polypeptide or fragment thereof, a JMJ14 polypeptide or fragment thereof, an RDR2 polypeptide or fragment thereof, an NRPD2A/NRPE2 polypeptide or fragment thereof, an NRPB3/NRPD3/NRPE3A polypeptide or fragment thereof, an NRPE3B polypeptide or fragment thereof, an NRPB11/NRPD11/NRPE11 polypeptide or fragment thereof, an NRPB10/NRPD10/NRPE10 polypeptide or fragment thereof, an NRPB12/NRPD12/NRPE12 polypeptide or fragment thereof, an NRPB6A/NRPD6A/NRPE6A polypeptide or fragment thereof, an NRPB6B/NRPD6B/NRPE6B polypeptide or fragment thereof, an NRPB8A/NRPE8A polypeptide or fragment thereof, an NRPB8B/NRPD8B/NRPE8B polypeptide or fragment thereof, an NRPE5 polypeptide or fragment thereof, an NRPD4/NRPE4 polypeptide or fragment thereof, an NRPE7 polypeptide or fragment thereof, an NRPD7 polypeptide or fragment thereof, an NRPB5/NRPD5 polypeptide or fragment thereof, an NRPB9A/NRPD9A/NRPE9A polypeptide or fragment thereof, an NRPB9B/NRPD9B/NRPE9B polypeptide or fragment thereof, an ATRX polypeptide or fragment thereof, a MOM1 polypeptide or fragment thereof, a MORC1 polypeptide or fragment thereof, an SssI polypeptide or fragment thereof, a DRM2-MTase polypeptide or fragment thereof, a DNMT3A polypeptide or fragment thereof, a DNMT3L polypeptide or fragment thereof, an MBD9 polypeptide or fragment thereof, a SUVH2 polypeptide or a fragment thereof, a SUVH9 polypeptide or a fragment thereof, a DMS3 polypeptide or a fragment thereof, a MORC6 polypeptide or a fragment thereof, a SUVR2 polypeptide or a fragment thereof, a DRD1 polypeptide or a fragment thereof, an RDM1 polypeptide or a fragment thereof, a DRM3 polypeptide or a fragment thereof, a DRM2 polypeptide or a fragment thereof, and an FRG polypeptide or a fragment thereof.

9. An expression vector comprising the recombinant nucleic acid of claim 8.

10. A host cell comprising the expression vector of claim 9.

11. A recombinant plant comprising the recombinant nucleic acid of claim 9.

12. A plant having reduced expression of one or more target nucleic acids as a consequence of the method of any one of claims 1-7.

13. A progeny plant of the plant of claim 12.

14. The progeny plant of claim 13, wherein the progeny plant has reduced expression of the one or more target nucleic acids and does not comprise the recombinant nucleic acid.

15. A method for reducing expression of one or more target nucleic acids in a plant, comprising:
(a) providing a plant comprising:
a recombinant nucleic acid encoding a recombinant polypeptide selected from the group consisting of an SHH1-like protein, an SHH2-like protein, an AGO4-like protein, an HDA6-like protein, an NRPD1-like protein, a JMJ14-like protein, an RDR2-like protein, an NRPD2A/NRPE2-like protein, an NRPB3/NRPD3/NRPE3A-like protein, an NRPE3B-like protein, an NRPB11/NRPD11/NRPE11-like protein, an NRPB10/NRPD10/NRPE10-like protein, an NRPB2/NRPD12/NRPE12-like protein, an NRPB6A/NRPD6A/NRPE6A-like protein, an NRPB6B/NRPD6B/NRPE6B-like protein, an NRPB8A/NRPE8A-like protein, an NRPB8B/NRPD8B/NRPE8B-like protein, an NRPE5-like protein, an NRPD4/NRPE4-like protein, an NRPE7-like protein, an NRPD7-like protein, an NRPB5/NRPD5-like protein, an NRPB9A/NRPD9A/NRPE9A-like protein, an NRPB9B/NRPD9B/NRPE9B-like protein, an ATRX-like protein, a MOM1-like protein, a MORC1-like protein, an SssI-like protein, a DRM2-MTase-like protein, a DNMT3A-like protein, a DNMT3L-like protein, a MBD9-like protein, a SUVH2-like protein, a SUVH9-like protein, a DMS3-like protein, a MORC6-like protein, a SUVR2-like protein, a DRD1-like protein, an RDM1-like protein, a DRM3-like protein, a DRM2-like protein, and an FRG-like protein; and
a crRNA and a tracrRNA, or fusions thereof;
and wherein the plant expresses a dCAS9 protein,
(b) growing the plant under conditions whereby the recombinant nucleic acid is expressed and whereby the recombinant polypeptide is targeted to the one or more target nucleic acids, thereby reducing expression of the one or more target nucleic acids.

16. The method of claim 15, wherein the recombinant polypeptide comprises a dCAS9 protein or fragment thereof.

17. The method of claim 15, wherein the recombinant polypeptide comprises an MS2 coat protein or fragment thereof.

18. The method of claim 15, wherein the recombinant polypeptide comprises an scFV antibody or fragment thereof.

19. The method of any one of claims 15-18, wherein the recombinant polypeptide interacts with an RNA polymerase.

20. The method of claim 19, wherein the RNA polymerase is RNA polymerase IV or RNA polymerase V.

21. The method of any one of claims 15-20, wherein the recombinant polypeptide induces RNA-directed DNA methylation.

22. The method of any one of claims 15-21, wherein the one or more target nucleic acids are endogenous nucleic acids.

23. The method of any one of claims 15-21, wherein the one or more target nucleic acids are heterologous nucleic acids.

24. The method of any one of claims 15-23, wherein expression of the one or more target nucleic acids is silenced.

25. A recombinant nucleic acid which encodes a recombinant polypeptide selected from the group consisting of an SHH1-like protein, an SHH2-like protein, an AGO4-like protein, an HDA6-like protein, an NRPD1-like protein, a JMJ14-like protein, an NRPD2A/NRPE2-like protein, an NRPB3/NRPD3/NRPE3A-like protein, an NRPE3B-like protein, an NRPB11/NRPD11/NRPE11-like protein, an NRPB10/NRPD10/NRPE10-like protein, an NRPB12/NRPD12/NRPE12-like protein, an NRPB6A/NRPD6A/NRPE6A-like protein, an NRPB6B/NRPD6B/NRPE6B-like protein, an NRPB8A/NRPE8A-like protein, an NRPB8B/NRPD8B/NRPE8B-like protein, an NRPE5-like protein, an NRPD4/NRPE4-like protein, an NRPE7-like protein, an NRPD7-like protein, an NRPB5/NRPD5-like protein, an NRPB9A/NRPD9A/NRPE9A-like protein, an NRPB9B/NRPD9B/NRPE9B-like protein, an ATRX-like protein, a MOM1-like protein, a MORC1-like protein, an SssI-like protein, a DRM2-MTase-like protein, a DNMT3A-like protein, a DNMT3L-like protein, a MBD9-like protein, a SUVH2-like protein, a SUVH9-like protein, a DMS3-like protein, a MORC6-like protein, a SUVR2-like protein, a DRD1-like protein, an RDM1-like protein, a DRM3-like protein, a DRM2-like protein, and an FRG-like protein.

26. An expression vector comprising the recombinant nucleic acid of claim 25.

27. A host cell comprising the expression vector of claim 26.

28. A recombinant plant comprising the recombinant nucleic acid of claim 25.

29. A plant having reduced expression of one or more target nucleic acids as a consequence of the method of any one of claims 15-24.

30. A progeny plant of the plant of claim 29.

31. The progeny plant of claim 30, wherein the progeny plant has reduced expression of the one or more target nucleic acids and does not comprise the recombinant nucleic acid.

32. A method for reducing expression of one or more target nucleic acids in a plant, comprising:
(a) providing a plant comprising a recombinant nucleic acid, wherein the recombinant nucleic acid encodes a recombinant polypeptide comprising a first amino acid sequence comprising a DNA-binding domain and a second amino acid sequence comprising a polypeptide selected from the group consisting of an SHH1 polypeptide or fragment thereof, an SHH2 polypeptide or fragment thereof, an AGO4 polypeptide or fragment thereof, an HDA6 polypeptide or fragment thereof, an NRPD1 polypeptide or fragment thereof, a JMJ14 polypeptide or fragment thereof, an RDR2 polypeptide or fragment thereof, an NRPD2A/NRPE2 polypeptide or fragment thereof, an NRPB3/NRPD3/NRPE3A polypeptide or fragment thereof, an NRPE3B polypeptide or fragment thereof, an NRPB11/NRPD11/NRPE11 polypeptide or fragment thereof, an NRPB10/NRPD10/NRPE10 polypeptide or fragment thereof, an NRPB12/NRPD12/NRPE12 polypeptide or fragment thereof, an NRPB6A/NRPD6A/NRPE6A polypeptide or fragment thereof, an NRPB6B/NRPD6B/NRPE6B polypeptide or fragment thereof, an NRPB8A/NRPE8A polypeptide or fragment thereof, an NRPB8B/NRPD8B/NRPE8B polypeptide or fragment thereof, an NRPE5 polypeptide or fragment thereof, an NRPD4/NRPE4 polypeptide or fragment thereof, an NRPE7 polypeptide or fragment thereof, an NRPD7 polypeptide or fragment thereof, an NRPB5/NRPD5 polypeptide or fragment thereof, an NRPB9A/NRPD9A/NRPE9A polypeptide or fragment thereof, an NRPB9B/NRPD9B/NRPE9B polypeptide or fragment thereof, an ATRX polypeptide or fragment thereof, a MOM1 polypeptide or fragment thereof, a MORC1 polypeptide or fragment thereof, an SssI polypeptide or fragment thereof, a DRM2-MTase polypeptide or fragment thereof, a DNMT3A polypeptide or fragment thereof, a DNMT3L polypeptide or fragment thereof, an MBD9 polypeptide or fragment thereof, a SUVH2 polypeptide or a fragment thereof, a SUVH9 polypeptide or a fragment thereof, a DMS3 polypeptide or a fragment thereof, a MORC6 polypeptide or a fragment thereof, a SUVR2 polypeptide or a fragment thereof, a DRD1 polypeptide or a fragment thereof, an RDM1 polypeptide or a fragment thereof, a DRM3 polypeptide or a fragment thereof, a DRM2 polypeptide or a fragment thereof, and an FRG polypeptide or a fragment thereof; and
(b) growing the plant under conditions whereby the recombinant polypeptide encoded by the recombinant nucleic acid is expressed and binds to the one or more target nucleic acids, thereby reducing expression of the one or more target nucleic acids.

33. The method of claim 32, wherein the DNA-binding domain comprises a zinc finger domain.

34. The method of claim 33, wherein the zinc finger domain comprises two, three, four, five, six, seven, eight, or nine zinc fingers.

35. The method of claim 33, wherein the zinc finger domain is a zinc finger array.

36. The method of claim 33, wherein the zinc finger domain is selected from the group consisting of a Cys2His2 (C2H2) zinc finger domain, a CCCH zinc finger domain, a multi-cysteine zinc finger domain, and a zinc binuclear cluster domain.

37. The method of claim 32, wherein the DNA-binding domain is selected from the group consisting of a TAL effector targeting domain, a helix-turn-helix family DNA-binding domain, a basic domain, a ribbon-helix-helix domain, a TBP domain, a barrel dimer domain, a real homology domain, a BAH domain, a SANT domain, a Chromodomain, a Tudor domain, a Bromodomain, a PHD domain, a WD40 domain, and a MBD domain.

38. The method of claim 32, wherein the DNA-binding domain comprises a TAL effector targeting domain.

39. The method of claim 32, wherein the DNA-binding domain comprises three C2H2 zinc finger domains.

40. The method of claim 32, wherein the recombinant polypeptide interacts with an RNA polymerase.

41. The method of claim 40, wherein the RNA polymerase is RNA polymerase IV or RNA polymerase V.

42. The method of any one of claims 32-41, wherein the recombinant polypeptide induces RNA-directed DNA methylation.

43. The method of any one of claim 32-42, wherein the one or more target nucleic acids are endogenous nucleic acids.

44. The method of any one of claim 32-42, wherein the one or more target nucleic acids are heterologous nucleic acids.

45. The method of any one of claim 32-42, wherein expression of the one or more target nucleic acids is silenced.

46. A method for reducing expression of one or more target nucleic acids in a plant, comprising:
(a) providing a plant comprising a recombinant polypeptide selected from the group consisting of an SHH1-like protein, an SHH2-like protein, an AGO4-like protein, an HDA6-like protein, an NRPD1-like protein, a JMJ14-like protein, an RDR2-like protein, an NRPD2A/NRPE2-like protein, an NRPB3/NRPD3/NRPE3A-like protein, an NRPE3B-like protein, an NRPB11/NRPD11/NRPE11-like protein, an NRPB10/NRPD10/NRPE10-like protein, an NRPB12/NRPD12/NRPE12-like protein, an NRPB6A/NRPD6A/NRPE6A-like protein, an NRPB6B/NRPD6B/NRPE6B-like protein, an NRPB8A/NRPE8A-like protein, an NRPB8B/NRPD8B/NRPE8B-like protein, an NRPE5-like protein, an NRPD4/NRPE4-like protein, an NRPE7-like protein, an NRPD7-like protein, an NRPB5/NRPD5-like protein, an NRPB9A/NRPD9A/NRPE9A-like protein, an NRPB9B/NRPD9B/NRPE9B-like protein, an ATRX-like protein, a MOM1-like protein, a MORC1-like protein, an SssI-like protein, a DRM2-MTase-like protein, a DNMT3A-like protein, a DNMT3L-like protein, a MBD9-like protein, a SUVH2-like protein, a SUVH9-like protein, a DMS3-like protein, a MORC6-like protein, a SUVR2-like protein, a DRD1-like protein, an RDM1-like protein, a DRM3-like protein, a DRM2-like protein, and an FRG-like protein; and
(b) growing the plant under conditions whereby the recombinant polypeptide is targeted to the one or more target nucleic acids, thereby reducing expression of the one or more target nucleic acids.

47. A method for reducing expression of one or more target nucleic acids in a plant, comprising:
(a) providing a plant comprising:
a first recombinant polypeptide comprising a nuclease-deficient CAS9 polypeptide (dCAS9) or fragment thereof and a multimerized epitope;
a second recombinant polypeptide comprising a DRM2-MTase polypeptide or a DNMT3A-DNMT3L fusion polypeptide, and an affinity polypeptide that specifically binds to the epitope;
a crRNA and a tracrRNA, or fusions thereof; and
(b) growing the plant under conditions whereby the first and second recombinant polypeptides are targeted to the one or more target nucleic acids, thereby reducing expression of the one or more target nucleic acids.

48. A recombinant vector comprising:
a first nucleic acid sequence comprising a plant promoter and that encodes a recombinant polypeptide comprising a nuclease-deficient CAS9 polypeptide (dCAS9) or fragment thereof and a multimerized epitope;
a second nucleic acid sequence comprising a plant promoter and that encodes a recombinant polypeptide comprising a DRM2-MTase polypeptide or a DNMT3A-DNMT3L fusion polypeptide, and an affinity polypeptide that specifically binds to the epitope; and
a third nucleic acid sequence comprising a promoter and that encodes a crRNA and a tracrRNA, or fusions thereof.

49. A host cell comprising the vector of claim 48.

50. A recombinant plant comprising the vector of claim 48.

51. A plant having reduced expression of one or more target nucleic acids as a consequence of the method of claim 46 or claim 47.

52. A progeny plant of the plant of claim 51.

53. The progeny plant of claim 52, wherein the progeny plant has reduced expression of the one or more target nucleic acids and does not comprise the recombinant polypeptide targeted to the one or more target nucleic acids.

The application's sequence listing, which the Patent Office published only in electronic form, follows.

SEQUENCE LISTING (897 sequences)

SEQ ID NO: 1 - protein, 258 aa, Arabidopsis thaliana
MAASDDSSHYFTEFTLSEIVDMENLYKELGDQSLHKDFCQTVASTFSCSVNRNGKSSITWKQVQIWFQEKLKHQSQPKSKTLPSPPLQIHDLSNPSSYASNASNATFVGNSTFVQTRKGKASDLADLAFEAKSARDYAWYDVSSFLTYRVLRTGELEVRVRFSGFDNRHDEWVNVKTSVRERSIPVEPSECGRVNVGDLLLCFQEREDQALYCDGHVLNIKRGIHDHARCNCVFLVRYELDNTEESLGLERICRRPEE

SEQ ID NO: 2 - protein, 285 aa, Ricinus communis
MTASHELGGHRRPHTRETLETSLTTTQNPVNIAKQKAQSLFWLVMGSPSEFTLAEMVEMENIYKELGEESLDSEFCERLATSFSFTANRAGKPAITWEQVQSWFEDRQKESRPRVSPSPLSLKLFVDLSNAKISSDAPESSRNSKGKVTDLSELIFEARSSRDNAWYDVAAFLNYRVLSTGELEARVRFSGFRNTDDEWVNVKRAVRERSIPLEPSECHRVKVGDLVLCFRERFDQAVYCDAHVVGIQRRPHEAASCRCIFVVRYDHDNTEEAAQLERLCCRPTQ

SEQ ID NO: 3 - protein, 273 aa, Glycine max
MEKLPLTEYPFPKLSLDEILELERIYKDVVGKVFNRKLCQEIAKRFSSSSNGAGKNSLSWQQVQLWFRNSQRMLLGEDISSSDLLKISADLADSPLLGNGKGKQATDLDDMGFEARSTKDNAWHDVSMFLNYRVLSTGELEVRVRYAGFGKEQDEWMNVKLGVRERSIPLEPSECHKVKDGDLVLCFLEKEDYALYCDARIVKIQRKIHDPTDCTCTFIVQFVHDNTEEGVSFSRICCRPTQEESACFPDLALDPTQSPSLNFPLNTIESLWG

SEQ ID NO: 4 - protein, 381 aa, Zea mays
MGRPPSTTGAPAFRFLPSEVAEMEARLLQLNNGIPTRAMLQTLADKFSASPERAGKVAIQPKQVWNWFQNRRYSHRAKTTRVVPSPPAKMPSGADHHQHAANASAFRAAQPSSVAVAHHGSSSTGKNPMEGVSVEFEAKSARDGAWYDVAAFLSHRLFESGDPEVRVRFSGFGAEEDEWINVRKCVRQRSLPCEATECVAVLPGDLILCFQEDKEQALYFDARVLDAQRRRHDVRGCRCRFLVRYDHDSSEEIVPLRKVCRRPETDYRLQILHAARAAAASADIHTPPREAKVELASNAKSPYEQKPQKQYKMMDVNTDEEVTMVSTLEQDETQGKTVAPVPSATAETRNSSSDAVMKDAEASSVAQDDDEVQVVDKMKEG

SEQ ID NO: 5 - protein, 270 aa, Medicago truncatula
MKELTSNESPFPKLSLDEILELERIYNDVGEKSLDPNFCKDIAANFSSSSNSDGKTSLTWEQVQQWLQNKHTETKGHFASSPEGLNLVVDLSGKSSSIKGNKSSPKPKGIQAADLSELAFEAVSIKDNAWHDVSMFLNYRVLCTGELEVRVRYHGFGKDEDEWINVKYGVRQRSIPLEASECHKVKEGHLVLCFHVKSDYALYCDAIVLKIQRREHDSEECSCIFTVRFYHDKFEEEVRWDSLCCRPTQEESEVPFELEPTMNPIANLWG

SEQ ID NO: 6 - protein, 274 aa, Physcomitrella patens
MGRTPMSGGTAFRFLPAEVADMEKALDASNGATPARSIVETLADKFTNSSERSGQRPVQWKQQVWNWFQNRRHAQKAKIDKLKGVGPGGETPSAAKSVVIMLVTVRLCILVDRVNVITGAAKKPNVHVPMDFEAKSARDGAWYVYDVSAFINKRTGENGEPEVRVRFAGFGSEEDEWVNIATAVRQRSLPCETTECVAVLPGDLILCFQEGSEQALYFDADILDVQRRRHDVRGCRCRFWVRYRHDQTEVEVVPLRKVCRRPETEQRLQQAREA

SEQ ID NO: 7 - protein, 381 aa, Sorghum bicolor
MGRPPSTTGAPAFRFLPSEVAEMEARLQQLNNGIPSRGVLQTLADKFSASPERAGKVAIQPKQVWNWFQNRRYSHRAKSTRAVPSPPAKMTPSGADHHQHAANASAFRAAQPSSVAAAHHGASPTGKNPVEGVSVEFEAKSARDGAWYDVAAFLSQRLFETGEPEVRVRFSGFGAEEDEWINVRKCVRQRSLPCEATECVAVLPGDLILCFQEGKEQALYFDARVLDAQRRRHDVRGCRCRFLVRYDHDSSEEIVPLRKVCRRPDTDYRLQILHAARVAATNADIHTPPKEIKVELTSNDKSPTEQKPQKQHKMMDVNTDEVTMVSTLEQDETQGKTVAPLPSSTVETRNSSSDAVMKDAEASSVVEDDDEVQVVDKMKEG

SEQ ID NO: 8 - protein, 269 aa, Oryza sativa
MERRSSVRFAPSEIARMEKLVTHKKEQVLDEIFCRKLAEEFNCSPGRVGSKALQAVQVQEWFRQKFPASTVIPPCLPTGSEEKALASQASAPVSEEKPPSSEENALAVDTSISNDIGEVSPDLPIDNIDKLPEIEDMQFEARSSKDFAWYDIATFLAYRKLSSGEFEVRVRFQGFGAEEDEWINVRKAIRLQSIPLESSECKLIREGDLVLCFKESNDEALHFDAHVLEIQRKQHDIRGCRCVFLVEYDHDGTQERVNLRRLSRRPKHS

SEQ ID NO: 9 - protein, 360 aa, Brachypodium distachyon
MGRPPSSGGPAFRFTHAEVAEMEEHLRHLNNAIPHRDVIQGLADKFTASPARAGKISVQPKQVWNWFQNRRYSQRNRTTRGAPLPQGKMLPTGAADEHHSASFGAQSASSVYPTGKNSSNGGQVDFEAKSARDGAWYDVAHFLSHRLFETGEPEVRVRFSGFGAEEDEWINVRKCVRQRSLPCEPTECVAVLPGDLILCFQEGKEQALYFDARILDAQRRRHDVRGCRCRFLVRYDHDHSEEIVPLRKVCRRPDNGFRQHILHANRVAASAQDVHMGIQIDRSSAEQKPQKPHKMMDVNTDEVTMVPKVEPTDKPVVSLPAASISTRGDSSSDVTMKDAGATPEVEAADEGQGDKMNAGE

SEQ ID NO: 10 - protein, 239 aa, Populus trichocarpa
MDFEFTLSEMLEMENMFKELEEGPLAPQFCEKLASSFSLAPSRDGKQAITPRQVKSWFQDRLKKSQPRVASSNMALKLFADLSDASASFGATESSQKLKGNASDLSELIFEALSSKDNAWYDVASFLNYRVVCSGELEVRVRFAGFRNTDDEWVNVRRAVRERSIPLESSECQRVKVGDLVLCFQEREERAVYCDAHIVEINRKLHDINGCRCTFVVRYDHDDFEEEVRLDRLCGRPTP

SEQ ID NO: 11 - protein, 247 aa, Vitis vinifera
MDDAPVPIACFTQSEILEMENLFEEFGEETLGQEFCQDLATSFSASPGCSGNMPVGWKEVRDWFQTKQKELVARVTSSPVAPRGIDALPEAPMSNNAPQNSIVPRGDMVAADLSELTYEAKSSKDDAWYDVAAFLTYRVLSSGELEARVRFSGFGNEEDEWVNVKKGIRKRSIPLEPSECYRVRVGDLVLCFQERSDQAVYCDAHIIEIQRRLHDIKGCRCIFVVRYDHDHGEEKVNLKRLCCRPTL

SEQ ID NO: 12 - protein, 279 aa, Cucumis sativus
MEHRKSSKLLDDSSFEFTLAEIVEMDNILKDSRDQTLGQEFFQDVALHFSCSPWRAAKSPVTTEHVHAWFENRRKELRASSKKARPPPPPPSELPPLPTPSSPPPSPPPKLLLYHSESDFLTHAPSSGPPEFKGKATDLSELAFEAFSSRDHAWYDVASFLTYRVNCHGELDARVRYAGFTKDEDEWVNVGRGVRDRSIPLESSECYRVKVGDLVLCFQERQDHALYFDAHVVEIQRRLHDIGGCRCIFVVRYEHDRHEEKVHIGRLCCRPSAFSSDQI

SEQ ID NO: 13 - protein, 276 aa, Arabidopsis lyrata
MAAPDDSSHYFTEFTLAEIRDSCFVILLYCSSSAKIVDMENLYKELGDQSLHKDFCQTVASTFSFMSSSIVSQSCSVNRNGKSTVTWKQIQSWFQEKLKQQSQPKFKTLPSPPLQIHDLSNPSCYAANATFVQTRKGKASDLADLAFEAKSARDYAWYDVSSFLTYRVLRTGELEVRVRFSGFDNRHDEWVNVKTSVRERSIPLEPSECGRVNIGDLLLCFQERDDQALYCDGHVVNIKRGIHDHRRCNCVFLVRYDLDNTEEPLGLEKICRRPDE

SEQ ID NO: 14 - protein, 349 aa, Arabidopsis thaliana
MGRPPSNGGPAFRFILPEVTEMEAILLQHNTAMPGRHILEALADKFSESPERKGKVVVQFKQIWNWFQNRRYALRARGNKAPGKLNVSSMPRMDLPNQMRSVIQPLSVPKTTHMTGNLPGMTPAPSGSLVPGVMRSGSDNSYLEFEAKSARDGAWYDVQAFLAHRNLEIGDPEVQVRFAGFEVEEDEWINVKKHVRQRSLPCEASECVAVLAGDLVLCFQEGKDQALYFDAIVLDAQRRRHDVRGCRCRFLVRYSHDQSEQEIVPLRKICRRPETDYRLQQLHNAVNDLANSNQHQIPALDAAAKTPLSLPGATVPIVAPESKDPSLSATPATLVQPSSNAATVPAGSA

SEQ ID NO: 15 - protein, 924 aa, A. Thaliana
MDSTNGNGADLESANGANGSGVTEALPPPPPVIPPNVEPVRVKTELAEKKGPVRVPMARKGFGTRGQKIPLLTNHFKVDVANLQGHFFHYSVALFYDDGRPVEQKGVGRKILDKVHQTYHSDLDGKEFAYDGEKTLFTYGALPSNKMDFSVVLEEVSATRANGNGSPNGNESPSDGDRKRLRRPNRSKNFRVEISYAAKIPLQALANAMRGQESENSQEAIRVLDIILRQHAARQGCLLVRQSFFHNDPTNCEPVGGNILGCRGFHSSFRTTQGGMSLNMDVTTTMIIKPGPVVDFLIANQNARDPYSIDWSKAKRTLKNLRVKVSPSGQEFKITGLSDKPCREQTFELKKRNPNENGEFETTEVTVADYFRDTRHIDLQYSADLPCINVGKPKRPTYIPLELCALVPLQRYTKALTTFQRSALVEKSRQKPQERMTVLSKALKVSNYDAEPLLRSCGISISSNFTQVEGRVLPAPKLKMGCGSETFPRNGRWNFNNKEFVEPTKIQRWVVVNFSARCNVRQVVDDLIKIGGSKGIEIASPFQVFEEGNQFRRAPPMIRVENMFKDIQSKLPGVPQFILCVLPDKKNSDLYGPWKKKNLTEFGIVTQCMAPTRQPNDQYLTNLLLKINAKLGGLNSMLSVERTPAFTVISKVPTIILGMDVSHGSPGQSDVPSIAAVVSSREWPLISKYRASVRTQPSKAEMIESLVKKNGTEDDGIIKELLVDFYTSSNKRKPEHIIIFRDGVSESQFNQVLNIELDQIIEACKLLDANWNPKFLLLVAQKNHHTKFFQPTSPENVPPGTIIDNKICHPKNNDFYLCAHAGMIGTTRPTHYHVLYDEIGFSADELQELVHSLSYVYQRSTSAISVVAPICYAHLAAAQLGTFMKFEDQSETSSSHGGITAPGPISVAQLPRLKDNVANSMFFC

SEQ ID NO: 16 - protein, 924 aa, A. Lyrata
MDSTNGNGADLESANGANGSGVVTDALPPPPPVIPPNVEPVRVKTELAEKKNLRVPMARKGFGTRGQKIPLLTNHFKVDVANLQGHFFHYSVALFYDDGRPVEAKGVGRKILDKVHETYHSDLDGKEFAYDGEKTLFTYGALPDNKMDFSVVLEEVSAARTNGNGSPNGNESPSDGDRKRLRRPNRSKNFRVEISYAAKIPLQALANAMRGQESENSQEAIRVLDIILRQHAARQGCLLVRQSFFHNDPSNCEQVGGNILGCRGFHSSFRTTQGGMSLNMDVTTTMIIKPGPVVDFLIANQNARDPYSIDWSKAKRTLKNLRVKVSPSNQEFRITGLSDKPCREQTFELKKRNPNENGEFDTTEVTVADYFREIRHIDLQYSADLPCINVGKPKRPTYIPLELCALIPLQRYTKALNTFQRSALVEKSRQKPQERMTVLSKALKVSNYDAEPLLRSCGISISSNFTQVEGRVLPAPKLKMGCGSETFPRNGRWNFNNKQFVEPTKIERWVVVNFSARCNVRQVVDDLIKIGGSKGIEIAPPFQVFEEGNQFRRAPPMNRVENMFKDIQSKLPGVPQFILCVLPEKKNCDLYGPWKKKNLTEFGIVTQCMAPTRQPNDQYLTNLLLKINAKLGGLNSMLSVERTPAFTVISKVPTIILGMDVSHGSPGQSDVPSIAAVVSSREWPLISKYRASVRTQPSKAEMIESLFKKNGTEDDGIIKELLVDFYTSSNKRKPEHIIIFRDGVSESQFNQVLNIELDQIIEACKLLDANWNPKFLLLVAQKNHHTKFFQTSSPDNVPPGTIIDNKICHPKNNDFYLCAHAGMIGTTRPTHYHVLYDEIGFSPDELQELVHSLSYVYQRSTTAISVVAPICYAHLAAAQLGTFMKFEDQSETSSSHGGITAPGPISVAQLPKLKDNVANSMFFC

SEQ ID NO: 17 - protein, 915 aa, C. Sativus
MSSNEPDGNGADAVLPPPPPPPPIPPNVVPIQAELEQAPEIVKKKVVRVPIARRGLASKGQKISLLTNHFKVNVTNIEGHFFHYSVALAYEDGRPVDGKGVGRKVIDKVHETYNSELAGKDFAYDGEKSLFTVGPLPRNKLEFTVVLEDITSNRNNGNCSPDGHGSPNNGDRKRMKRPYRSKSFKVEISFAAKIPMQAIASALRGQESENFQEAIRVLDIILRQNASKQGCLLVRQSFFHNDPNSCTDVGGGVLGCRGFHSSFRTTQSGLSLNIDVSTTMIIQPGPVVDFLIANQNVRDPFSLDWTKAKRTLKNLRIKASPSNAEYKITGLSEKPCKEQTFTLKQKGGNDEDCIEITVYDYFVKHRNIELRYSSDLPCINVGKPKRPTFIPVELCSLVSLQRYTKALSTFQRASLVEKSRQKPQERMRVLSDSLRRNKYDAEPMLRSCGIAINSSFIQVEGRVLPAPKLKVGNGEDFFPRNGRWNFNNKKLAQPTKIERWAVVNFSARCDTRGLVRDLIKCGDMKGIAIEAPFDVFEENPQFRRAPPMVRVEKMFEEVQSKLPGQPQFLLCLLPERKNSDLYGPWKKKNLAEFGIVTQCIAPTRVNDQYLTNVLLKINAKLGGLNSLLAVEHSPSIPMVSKVPTIILGMDVSHGSPGQSDIPSIAAVVSSRQWPLISRYRAAVRTQSPKVEMIDSLYKRISDTEDDGIMRELLLDFYTSSGKRKPDQIIIFRDGVSESQFNQVLNVELDQIIQSCKFLDENWNPKFVVIVAQKNHHTKFFQPGSPDNVPPGTIIDNKICHPRNNDFYLCAHAGMIGTTRPTHYHVLLDEVGFSADDLQELVHSLSYVYQRSTTAISVVAPVCYAHLAATQIGQFIKFEETSETASSDGGLTSAGAVPVPQLPRLQEKVCNSMFFC

SEQ ID NO: 18 - protein, 913 aa, V. Vinifera
MDSGEDGNGAQDALPPPPPVPPNVVPIKADSVASEPVKKKVARVPIARRGFASKGQKIALTTNHFKVNVTGADGHFFHYSVSLSYEDGRPVDGKGIGRKVIDRVHETYDSELGGKDFAYDGEKSLFTVGPLPRNKLEFTVVLEDVSSNRNNGNGSPDRGSPNESDRKRMRRPYQSKTFKVEISFAAKIPMQAIANALRGQESENSQEALRVLDIILRQHASKQGCLLVRQSFFHNDPKNFIDLGGGVLGCRGFHSSFRTTQGGLSLNIDVSTTMIVQPGPVVDFLIANQNARDPFSLDWAKAKKMLKNLRVKTSPSNTEYKITGLSEKPCKEQLFTLKQRNGKDENGEAQTIEVTVFDYFVNHRRIELRYSADLPCINVGKPKRPTYFPIELCTLVSLQRYTKALSTLQRASLVERSRQKPQERIGVLTNALRSNNYDAEPMLRSCGISISRDLTQIEGRVLAAPRLKVGNGEDFFPRNGRWNFNNKKLVEPTKIERWAVVNFSARCDIRNLVRELIKCGGMKGIHIDPPFDVFEENPQSRRAPPIVRVEKMFEEIQSKLPGAPQFLLCLLPERKNSDLYGPWKRKNLSEYGIVTQCIAPTRVNDQYLTNVLLKINAKLGGLNSMLAVEHSPSIPIVSKGPTIILGMDVSHGSPGQSDVPSIAAVVSSRQWPLISRYRASVRTQSPKVEMIDSLYKRVSETEDEGIIRELLLDFYVSSGKRKPDQIIIFRDGVSESQFNQVLNIELDQIIEACKFLDEKWSPKFVVIVAQKNHHTKFFQHGSPDNVPPGTVIDNKVCHPRNNDFYLCAHAGMIGTTRPTHYHVLLDEVGFSSDDLQELVHSLSYVYQRSTTAISVVAPICYAHLAATQMSQFMKFEDTSETSSSQGGLTSAGPVPVPQLPKLQESVCNSMFFC

SEQ ID NO: 19 - protein, 948 aa, M. Truncatula
MHRTNFIHILFVLFSNFIHFTAQNTLHSFFSFLSQTFFKEMGSQENEECLPPPPPIVPADIEPIKIEPQIVKKKLPTKVPMARRGLGSKGAKLPLLTNHFKVNVTNTDGYFFQYSVALFYEDGRPVEGKGAGRKILDRVQETYGSELNGKDLAYDGEKTLFTIGSLAQNKLEFTVVLEDVTSNRNNGNASPDGHGSPNDTDRKRLKKSHRSKTYKVEISFASKIPLQAIANALKGHETENYQEAIRVLDIILRQHAAKQGCLLVRQNFFHNDPKNFTDVGGGVLGCRGLHSSFRTTQSGLSLNIDVSTTMIVHPGPVVDFLIANQNVRDPFSLDWNKAKRTLKNLRITTSPTNQEYKITGLSEMPCKDQLFTLKKRGAVPGEDDTEEITVYDYFVNRRKISLQYSADLPCINVGKPKRPTFVPVELCSLVSLQRYTKALSTLQRSSLVEKSRQKPQERMRVLTDALKTSDYGSEPMLRNCGISITSGFTQVDGRVLQAPRLKFGNGEDFNPRNGRWNFNNKKIVQPVKIEKWAVVNFSARCDVRGLVRDLIKCGGMKGIHVEQPFDCFEENGQFRRAPPLVRVEKMFEHVQSKLPGAPKFLLCLLSERKNSDLYGPWKKKNLAEFGIVTQCIAPTRVNDQYLTNVLLKINAKLGGMNSLLGVEHSPSIPIVSKAPTLILGMDVSHGSPGQTEIPSIAAVVSSRQWPLISKYRACVRTQGAKVEMIDNLFKPVSDTEDEGIIRELLIDFYNSSGNRKPDNIIIFRDGVSESQFNQVLNIELSQIIEACKFLDEKWNPKFLVIVAQKNHHTKFFQPGSPDNVPPGTVVDNKICHPRNYDFYMCAHAGMIGTSRPTHYHVLLDEIGFSPDDLQELVHSLSYVYQRSTTAISVVAPICYAHLAASQVGQFMKFEDKSETSSSHGGSGRDINASPIPQLPKLMDSVCNSMFFV

SEQ ID NO: 20 - protein, 921 aa, R. Communis
MDSFEPDGNGLREGNGIHEGNGSQEGLPPPPPVVPPDVVPMRAEPEPVKKKVVRVPIARRGLGSKGQKISLLTNHFKVNVNKVDDYFFHYCVSLSYEDGRPVDGKGVGRKVIDRVHETYDSEMGGKKFAYDGEKSLFTVGALPRNKLEFTVVLEDVTSNRNNGNASPDGHGSPNEGDRKRMRRPYQSKTFKVEISFAAKIPMQAIANALRGQESENSQEAIRVLDIILRQHAAKQGCLLVRQNFFHNDPKNFADVGGGVLGCRGFHSSFRTTQGGLSLNIDVSTTMIIQPGPVVDFLIANQNVRDPFQLDWAKAKRTLKNLRIKASPSNQEYKITGLSEMPCKEQTFQLNQKGRDDNDPLELTVYDYFVNHRRIELRYSGDLPCINVGKPKRPTFIPIELCSLVSLQRYTKALNTLQRASLVEKSRQKPQERMSTLSNALKSSNYDAEPMLRSCGVSISTSFVQVDGRQLQAPKLKVGNGEDFFPRNGRWNFNNKKLVDPSKIERWAVVNFSARCDIRNLVRDLTKCAEMKGIPIEPPFDVFEENPQFRRAPPTVRVEKMFDSIQSKLPGAPKFLLCLLPERKNSDLYGPWKKKNLSDFGIVTQCIAPQRVNDQYLTNVLLKINAKLGGLNSMLAVEHSPSIPLVSKVPTIIIGMDVSHGSPGHSDVPSIAAVVSSRQWPLISRYRACVRTQSPKVEMIDSLYKPVSDTEDEGMMRELLLDFYSSSGKRKPEQIIIFRDGVSESQFNQVLNIELNQIIEACKHLDEKWNPKFVVIIAQKNHHTKFFQPGLPDNVPPGTVIDNKVCHPRNNDFYLCAHAGMIGTTRPTHYHVLLDEVGFSADELQELVHSLSYVYQRSTTAISVVAPVCYAHLAATQMGQFMKFEDASETSSSHGGVTSAGAVPVPQMPKLSDKVSSSMFFC

SEQ ID NO: 21 - protein, 906 aa, G. Max
MASFGPNGTENEDSLPPPPPVVPSDVVPVKAEPEKKKASRFPIARRGLASKGTKLQLLTNHYRVNVANTDGHFYQYSVALFYDDGRPVEGKGVGRKLLDRVHETYDSELNGKDFAYDGEKTLFTLGSLARNKLEFTVVLEDVIATRNNGNCSPEGNGELNESDKKRMRRPNRSKAFKVELSYASKIPLQAIANALRGQESENYQEAIRVLDIILRQHAAKQGCLLVRQSFFHNNPKNFADVGGGVLGCRGFHSSFRTTQSGLSLNIDVSTTMIITPGPVVDFLISNQNVRDPFSLDWAKAKRTLKNLRIKSSPSNQEFKITGLSELPCKDQMFTLKKKGGDDDTEEEVTVYDYFVNIRKIDLRYSGDLPCINVGKPKRPTYIPLELCSLVSLQRYTKALSTLQRSSLVEKSRQKPQERMRVLSDALKSSNYGSEPMLRNCGISISPNFTEVEGRVLQAPRLKFGNGEDFNPRNGRWNFNNKKIVKPTKIERWAVVNFSARCDIRGLVRDLIKCGGMKGIVIDQPFDVFEENGQFRRAPPVVRVEKMFELVQSKLPGAPQFLLCLLPERKNSDLYGPWKKKNLAEFGIVTQCIAPTRVNDQYLTNVLLKINAKLGGLNSMLGVEHSPSIPIVSRAPTIIIGMDVSHGSPGQTDIPSIAAVVSSREWPLISKYRASVRTQSPKMEMIDNLFKKVSDKEDEGIMRELLLDFYTSSGNRKPDNIIIFRDGVSESQFNQVLNIELDQIIEACKFLDEKWNPKFLVIVAQKNHHTKFFQPGAPDNVPPGTVIDNKICHPRNYDFYMCAHAGMIGTSRPTHYHVLLDEIGFSPDDLQELVHSLSYVYQRSTTAISVVAPICYAHLAATQMGQFMKFEDKSETSSSHGGSGIPAPPVPQLPRLQDKVSSSMFFC

SEQ ID NO: 22 - protein, 898 aa, Z. mays
MESHNGEADDLPPPPPLAAGVEPLKADETKMPLKPRSLVQRNGFGRKGQQIKLITNHFKVSLMKAEDFFYHYYVNLKYEDDTPVDRKGSGRKVIEKLQQTYAAELANKDFAYDGEKSLFTIGALPQVKMEFTVVDEDVSTGKTPANGSPGNDSPPGSDRKRVRRPYNTKTYKVELSFAAKIPMSAISQALRGQESEHTQEAIRVIDIILRQHSAKQGCLLVRQSFFHNNPSNFVDLGGGVVGCRGFHSSFRATQSGLSLNIDVSTTMIVKPGPVIDFLIANQKVNDPSMIDWAKAKRSLKNLRIKTSPANQEQKIVGLSDRPCREQLFTLKHKNGESEEITVFDYFVKNRGIKLEYSGDLPCINVGKPKRPTYFPVELCSLLPLQRYTKALSTLQRSSLVEKSRQKPQERMSVLSDVLQRSNYDAEPMLKACGITIARNFIEVDGRVLQPPKLKAGNGEDIFTRNGRWNFNNKKLIRASSVEKWAVVNFSARCNVRDLVRDLIKCGGMKGIMVDAPFAVFDENPSMRRSPAVRRVEDMFEQVKTKLPGAPKFLLCVLAERKNSDIYGPWKKKCLAEFGIVTQCVAPTRVNDQYLTNVLLKINAKLGGLNSLLQIETSPAIPLVSKVPTIILGMDVSHGSPGHSDIPSVAAVVSSREWPLISKYRASVRTQSPKMEMIDSLFKPRETDDDGLIRECLIDFYTSSGKRKPDQVIIFRDGVSESQFNQVLNIELQQIIEACKFLDEKWNPKFTLIIAQKNHHTKFFIPGKPDNVPAGTVVDNKVCHPRNFDFYMCSHAGMIGTTRPTHYHILHDEIGFNPDDLQELVHSLSYVYQRSTTAISVVAPICYAHLAAAQVGQFIKFDEMSETSSSHGGHTSAGSVPVQELPRLHEKVRSSMFFC

SEQ ID NO: 23 - protein, 909 aa, S. Bicolor
MGSHDGEDEELPPPPPVPPDVVPIKAEDVVGEPPANKPIKPKRLLMDRPGIGRKGQLAQLYSNHFKVAVKSTEDFFFHYYVNLKYEDDQPVEGKGIGRKVIDKLQQTYRAELSNKDFAYDGEKSLFTVGGLPQKNNEFTVVLEDASTGKTAANGSPGGNDSPGGGDRKRVRRPYQTKTFKVEINFAAKVPMSAIGQVIRGEETENSLEALRVLDIILRQHSAEQGCLLVKQSFFYNNPSNFVDLGGGVMGCRGFHSSFRGTQSGLSLNVDVSTTMIVKPGPVIDFLLSNQNVNDPSRIDWQKAKRALKGLRIRTTPANAEFKIFGLSERICKEQTFPLRQRNGSNGDCDTIDITVYDYYAKKGIDLKYSGDLPCINTGRAKRPTYFPIELCCLVPLQRYTKALSTLQRSSLVEKSRQKPQERMTVLNDALQRSNYDSDPMLRACGVSVAPKFTQVEGRILQAPKLKAGNGDDIFSRNGRWNFTNRKFYQTCSVDKWAVVNFSARCDVRNLIRDLMRNASAKGIQMEEPFDVFEESPSMRRAPVSRRVDDMFGQIKSKLPGAPRFLMCLLPERKNCEVYGPWKRKCLAEFGIVTQCLAPTRVNDPYLLNLLMKINAKLGGLNSLLQVEASPSIPHVSEVPTIILGMDVSHGHPGQDRPSVAAVVSSRQWPLISKYRASVHTQSARLEMMSSLFKPRGTDDDGLIRESLIDFYTSSGKRKPDHIIIFRDGVSESQFTQVINIELDQIIEACKFLDEKWSPKFTVIVAQKNHHTKFFQTGSPDNVLPGTVVDNKVCHPKNFDFYMCAHAGMIGTTRPTHYHVLHDEIGFSADEMQEFVHSLSYVYQRSTTAISVVAPICYAHLAAAQVGTFLKFEEMSDTSSSQGGHTSAGSAPVPELPRLHEKVRSSMFFC

SEQ ID NO: 24 - protein, 911 aa, O. Sativa
MDAHDGEADELPPPPPVPANVVPIKADDVESEVPANKPAKPKRFPMARPGLGRKGQPIQLLANHYKVSVKSSEEYFFHYNVILKYEDDRPVDGKGVGRKVIDKLQQTYRSELSSKDFAYDGEKSLFTIGALPQVTNEFTVVLEDVSTGKTAANGSPGGNDSPGGSDRKRVRRPYQTKTFKVELCFAAKIPMNAIAQAIKGQESENSQEALRVLDIILRQHSAKQGCLLVRQSFFHNNPNNFVDLGGGVMGCRGFHSSFRGTQSGLSLNIDVSTTMIVKPGPVIDFLLANQKVDHPDRIDWQKAKRALKNLRIRTTPVNSEFKIIGLSDRNCNEQMFSLRQRNGNNGDVDEVEVTVYDYFVKNKGIELRYSGNLPCINVGKPKRPTYFPIELCSLIPLQRYTKALSTLQRSSLVEKSRQKPQERMSVLNDALRHSNYDSDPMLRASGISIAQNFTQVEGRVLQPPKLKAGNGEDIFPRNGRWNFNNKKLIQTCSVDKWAVVNFSARCDVRNLIRDLIRNASAKGIQMAEPFDVFEESPSLRRAPVSRRVDDMFEQIKSKLPGAPKFLLCLLPERKNCEVYGPWKRKCLAEFGIVTQCLAPQRVNDQYLLNLLLKINAKLGGINSLLQIEASPSIPLVSKTPTIILGMDVSHGQPGQSDRPSIAAVVSSRQWPLISKYRASVHTQSPKLEMMSSLFKPRGTEDDGLIRESLIDFYTSSGKRKPDHVIVFRDGVSESQFTQVINIELDQIIEACKFLDEKWSPKFTVIVAQKNHHTKFFQSGSPDNVPPGTVVDKQVCHPRNYDFYMCAHAGMIGTTRPTHYHVLHDEIGFSPDDLQELVHSLSYVYQRSTTAISVVAPICYAHLAAAQVGTFLKFEDMSDASSSQGGHTSVGSVPVPELPRLHEKVRSSMFFC

SEQ ID NO: 25 - protein, 924 aa, B. Distachyon
MESHDGVADDLPPPPPLPPSIEPLKPEEADDLPPPPPLPPNVEPIKVEDAKKPRRTLISRPGFGKNGKPIQLVTNHFKVSLKTTDEFFHHYYVNLKYEDDRPVDGKGVGRKVIDKLQQTYASELAHKDFAYDGEKSLFTIGALPQVNNEFVVVLEDVSSGKTAANGSPGNDNSPGSDRKRVRRPYQTKTFKVELNFASRIPMSSIAMALQGQESEHTQEAIRVIDIILRQHAAKQGCLLVRQSFFHNNPSQFVDLGGGVMGCRGFHSSFRATKSGLSLNIDVSTTMIVKPGAVVDFLIANQKVDHPNKIDWAKAKRALKNLRIKTSPANTEFKIVGLSERNCYEQMFSLKQRNNGNGDSEAIEISVYDYFVKNRGIELRYSGDFPCINVGKPKRPTYFPIELCSLVPLQRYTKSLSTLQRSSLVEKSRQKPQERMSVLSDVLKRSSYDTDPMLKACGISIAQGFTQVPGRVLQPPKLKAGNGEDIFTRNGRWNFNNKRLVRASCVERWAVVNFSARCNCNDLVRDLIKCGGMKGIKVDQPFDVFEENSSMRRAPAPKRVEAMFETVKTKLPGAPKFLLCILAERKNSDVYGPWKRKCLAEFGIVTQCVAPTRVNDQYLTNVLLKINAKLGGMNSLLQIELSPAIPLVSKVPTMILGMDVSHGSPGQADTPSIAAVVSSREWPLVSKYRASVRSQSPKSEMIDSLFKPQGTEDDGLIRECLIDFYTSSGKRKPDQIIIFRDGVSESQFTQVLNKELDQINEACKFLDESWSPKFTLIVAQKNHHTKFFIPGSPDNVPPGTVVDNVVCHPKNYDFYMCAHAGMIGTTRPTHYHILHDDIHFTADDLQDLVHSLSYVYQRSTTAISVVSPICYAHLAAAQVSQFVKFDEMSETSSSQGGGGHTSAGSTPVQELPRLHEKVRSSMFFC

SEQ ID NO: 26 - protein, 911 aa, P. Trichocarpa
MESADEQNGNGSQEALPPPPPDVPPNVVPVKAEPEPVKKKPLRVPIARRGLGSKGQKMPLLTNHFKVNVTNTEGYFFHYCVSLAYEDGRPVDGKGVGRKVIDRVHETYDTEFGKDFAYDGEKSLFTVGPLPRNKLEFTVVLEDVVSNRNNGNASPDGHGSPNEGDRKRLRRPYHSKTFKVEISFAAKIPMQAIANALRGQESENSQEAFRVLDIILRQHAAKQGCLLVRQSFFHNDPKNFVDLGGGVLGCRGFHSSFRTSQGGLSLNIDVSTTMIIQPGPVVDFLIANQNVRDPFSLDWAKAKRMLKNLRVKASPSNQEYKITGLSEKTCKEQMFQLKQKNGGDGGIEAVEITVYDYFVNHRKIDLRYSGDLPCINVGKPKRPTYIPLELCSLVSLQRYTKALSTLQRSSLVEKSRQKPQERMTVLSSALKSSKYDAEPMLRSCGISINPSFTQVEGRVLPAPKLKVGNGEDFFPRNGRWNFNNKKLVEPSRIEKWAVVNFSARCDIRNLVQNLTKCAEMKGIPIEDPFDVFEENPQSRRAPPVVRVEKMFEQIQSRLPGQPKFLLCLLPERKNSDIYGPWKRKNLAEYGIVTQCIAPQRVNDQYITNVLLKINAKLGGLNSMLAVEHAPSLPLVSKVPTLILGMDVSHGSPGQSDVPSIAAVVSSRQWPLISRYRACVRTQSPKLEMIDSLFKRVSETEDEGIIRELLLDFYVTSGKRKPDQIIIFRDGVSESQFNQVLNIELDQIIEACKFLDEKWSPTFVVIVAQKNHHTKFFQPGSPDNVPPGTIIDNKVCHPRNNDFYLCAHAGMIGTTRPTHYHVLLDEVGFSADDLQELVHSLSYVYQRSTTAISVVAPICYAHLAATQMGQFMKFEDTSETSSSHGGVTSAGAVPVPQLPRLQEKVCNSMFFC

SEQ ID NO: 27 - protein, 922 aa, B. Napus
MDASTGNGAELESANGSGVSDALPPPPPIIPPNVEPVRVQTEVAVKKNLRVPMDRTGFGSKGQKIQLLTNHFGVKVANLQGFFYHYSVALFYDDGRPVEQKGVGRKVLDKVHETYHSDLDGKQFAYDGEKTLFTFGALPSNKMDFSVVLEEVSSARTTGNASPNGNEEPSDGDRKRLRRPNRSKSFRVEISYAAKIPLQALANAMRGQESENSQEAIRVLDIILRQHAARQGCLLVRQSFFHNDPSNCEPVGGNILGCRGFHSSFRTTQGGMSLNMDVTTTMIIKPGPLVDFVIANQGAKDPFTVDWSKAKRTLKNLRIKVSPSNQEYRITGMSDKPCREQTFEYRPRNAPKNENGESETIEITVYDYFLRERNLELQYSADLPCVNVGRPKRPTYIPLEHCTLIPLQRYTKALNTFQRSALVEKSRQKPQERMNVLSKALKVSNYDAEPLLRSCGISISSNFTQVEGRVLPAPKLKMGRGDELFPRNGRWNFNNKQFVEPTKIDKWAVANFSARCNVRQLVDDLIRIGGMKGIEIAAPFDVFEEGHQFRRAPPMIRVEKMFEEIQSKLPGAPQFLLCLLPERKNCDIYGPWKKKNLTEYGIVTQCMAPVRQPNDQYLTNCLLKINAKLGGLNSMLSVERTPAFTVISKVPTIILGMDVSHGSPGQSDVPSIAAVVSSRQWPLVSKYRASVRTQPSKAEMIESLVKKNGTEDDGIIKELLVDFYTSSGKRKPEHIIIFRDGVSESQFNQVLNIELDQIIEACKLLDENWNPKFLLLVAQKNHHTKFFQPNSPDNVPPGTIIDNKICHPKNNDFYLCAHAGMIGTTRPTHYHVLYDEIHFSPDELQELVHSLSYVYQRSTTAISVVAPICYAHLAAAQLGTFMKFEDQSETSSSHGGVTAPGPVSVAQLPKLKDNVANSMFFC

SEQ ID NO: 28 - protein, 471 aa, A. thaliana
MEADESGISLPSGPDGRKRRVSYFYEPTIGDYYYGQGHPMKPHRIRMAHSLIIHYHLHRRLEISRPSLADASDIGRFHSPEYVDFLASVSPESMGDPSAARNLRRFNVGEDCPVFDGLFDFCRASAGGSIGAAVKLNRQDADIAINWGGGLHHAKKSEASGFCYVNDIVLGILELLKMFKRVLYIDIDVHHGDGVEEAFYTTDRVMTVSFHKFGDFFPGTGHIRDVGAEKGKYYALNVPLNDGMDDESFRSLFRPLIQKVMEVYQPEAVVLQCGADSLSGDRLGCFNLSVKGHADCLRFLRSYNVPLMVLGGGGYTIRNVARCWCYETAVAVGVEPDNKLPYNEYFEYFGPDYTLHVDPSPMENLNTPKDMERIRNTLLEQLSGLIHAPSVQFQHTPPVNRVLDEPEDDMETRPKPRIWSGTATYESDSDDDDKPLHGYSCRGGATTDRDSTGEDEMDDDNPEPDVNPPSS

SEQ ID NO: 29 - protein, 471 aa, A. lyrata
MEADESGISLPSGPDGRKRRVSYFYEPTIGDYYYGQGHPMKPHRIRMAHSLIIHYHLHRRLEISRPNLADASDIGRFHSPEYVDFLASVSPESMGDPSSSRNLRRFNVGEDCPVFDGLFDFCRASAGGSIGAAVKLNRQDADIAINWGGGLHHAKKSEASGFCYVNDIVLGILELLKMFKRVLYIDIDVHHGDGVEEAFYTTDRVMTVSFHKFGDFFPGTGHIRDVGAEKGKYYALNVPLNDGMDDESFRSLFRPLIQKVMEVYQPEAVVLQCGADSLSGDRLGCFNLSVKGHADCLRFLRSYNVPLMVLGGGGYTIRNVARCWCYETAVAVGVEPDNKLPYNEYFEYFGPDYTLHVDPGPMENLNTPKDMEKIRNTLLEQLSGLIHAPSVQFQHTPPVNRVLDEPEEDMEQRPKPRIWSGTVTYESDSDDDDKPLHGYSGRGGATMDRDSTGEDEMEDDNPEPDVNPPSS

SEQ ID NO: 30 - protein, 465 aa, C. Sativus
MSDDIHGGASLPSGPDGRKRRVTYFYEPTIGDYYYGQGHPMKPHRIRMAHNLIVHYGLHRRMEINRPYPAGPEDIRRFHSDDYVDFLASVSPETLSDHAFSRHLKRFNVGEDCPVFDGLFGFCQASAGGSIGAAVKLNRGDADIAINWAGGLHHAKKSEASGFCYVNDIVLGILELLKYHKRVLYIDIDVHHGDGVEEAFYTTDRVMTVSFHKFGDFFPGTGHIKDVGVGTGKNYALNVPLNDGMDDDSFRGLFRPLIQKVMEVYQPDAVVLQCGADSLSGDRLGCFNLSVKGHADCLRFLRSFNVPLMVLGGGGYTIRNVARCWCYETAVAVGVEPDNKLPYNEYFEYFGPDYALHIEPSNMENLNSPKDMEKIRNTLLEQLSRLPHAPSVPFQMTPSSEIPEEVEESIERRPKRRIWNGEDYDSDSEENRKRPNISEGTGVNNLTRDVVDDMEEDKNMGHQCC

SEQ ID NO: 31 - protein, 464 aa, V. Vinifera
MEDGIGGASLPSGPDAKKRRVCYFYEPTIGDYYYGQGHPMKPHRIRMAHNLVVHYALHRRMEINRPFPAGPDDIRRFHSDDYVDFLASVTPDSLHDHAHSRYLKRFNVGEDCPVFDGLFGFCQASAGGSIGAAVKLNRRDADIALNWAGGLHHAKKSEASGFCYVNDIVLGILELLKVHRRVLYVDIDIHHGDGVEEAFFTTDRVMTVSFHKFGDFFPGTGHIRDIGVGPGKYYALNVPLNDGMDDESFRGLFRPIIQKVMAVYQPDAVVLQCGADSLSGDRLGCFNLSVNGHADCLRFLRSFNVPLMVLGGGGYTIRNVARCWCYETAVAVGVEPDNKLPYNEYYEYFGPDYTLHIEPCNMENQNSPKDLEKIRNMLLEQLSRLPHAPSVPFQTTPPITKVPEEEEEDMDKRPKPRIWNGEDCESDPDEDEKPRAQFSNTNHHPTSNVEMRGVTGKIKEEKTT

SEQ ID NO: 32 - protein, 476 aa, M. Truncatula
MGSGEMGVAESGGASLPSIGADAMKRRVTYFYEPSIGDYYYGQGHPMKPHRIRMAHNLIIHYSLHRRMQINRPFAAAPEDIRRFHSDDYVEFLSSVSPEIVSDNSHSHYRQLKRFNVGEDCPVFDGLFPFCQASAGGSIGAAVRLNRGDADIAINWAGGLHHAKKAEASGFCYVNDIVLGILELLKVHRRVLYVDIDVHHGDGVEEAFYTTDRVMTVSFHKFGDFFPGTGHIKDTGVGPGKDYALNVPLNDGMDDENFRALFRPIMQKVMDVYQPDAVVLQCGADSLSGDRLGCFNLSVKGHADCLRFLRSFNVPLMVLGGGGYTVRNVARCWCYETAVAVGVEPSNKLPYNEYYEYFGPDYTLHVEPNNMENLNTPKDMEKIRNTLLEQIARLPHAPSAPFQTTPSTAEVPEVEEEDMDIRPKRQLWSGEDYDSDPDEDEKANIRSSSLTSHMRRAADMMEEDKPEVKPGVHPPC

SEQ ID NO: 33 - protein, 468 aa, R. Communis
MGDETGGASLPSTGTDAKKRRVTYFYEPTIGNYYYGQGHPMKPHRIRMAHNLIVHYSLHRRMEINRPFPASTIDIRKFHSDDYVDFLSSVSPESLADPAHNRHLKRFNVGEDCPVFDGLFGFCQASAGGSMGAAVKLNRGDADIALNWAGGLHHAKKSEASGFCYVNDIVLGILELLKVHRRVLYVDIDVHHGDGVEEAFYTTDRVMTVSFHKFGDFFPGTGHIKDTGAGQGKNYALNIPLNDGMDDVSFRALFRPIIQKVMEVYQPDAVVLQCGADSLTGDRLGCFNLSVKGHADCLRFLRSFNVPLMVLGGGGYTIRNVARCWCYETAVAVGVEPDNKLPYNEYYEYFGPDYTLHIDPSNMENLNSPKDMERIRNILLEQLSKLPNAPSVPFQTTPAITEVPEEGDEEMDRRPKRRIWDGEGYESPDEDEKPQPRRLNSDGLVAKDEMRDHIDEMEEDKKDVHPQC

SEQ ID NO: 34 - protein, 476 aa, G. max
MGMEEESSNNSSIIEGGASLPSTGSDAKKRRVTYFYEPTIGDYYYGQGHPMKPHRIRMAHNLIVHYSLHRRMEINRPFPASPADIRRFHSDDYVDFLSSVSPETLADSAFSRHLKRFNVGEDCPVFDGLFPFCQASAGGSLGAAVKLNRADADIAINWAGGLHHAKKSEASGFCYVNDIVLGILELLKVHRRVLYVDIDVHHGDGVEEAFYTTDRVMTVSFHKFGDFFPGTGHVKDIGVGSGKNYAVNVPLNDGMDDESFRSLFRTIIQKVMEVYQPEAVVLQCGADSLSGDRLGCFNLSVRGHADCLRFLRSFNVPLMVLGGGGYTIRNVARCWCYETAVAVGVEPDNKLPYNEYYEYFGPDYTLYVDPSNMENLNTPKDMEKIRNTLLEQISQLPHAPGVPFQTTPPTLQLPEEAEEDMDRRPKLRKWDGEDYDSDPDEGGKANSKFPNVTAHMRDITDEMEEEKPEVHPSSCC

SEQ ID NO: 35 - protein, 458 aa, Z. mays
MAASGEGVSLPSPAGGEDAHRRRVSYFYEPSIGDYYYGQGHPMKPHRIRMAHSLVVHYGLHRLLELSRPYPASEADIRRFHSDDYVAFLASATGNPGVLDPRAIKRFNVGEDCPVFDGLFPFCQASAGGSIGAAVKLNRGDADITVNWAGGLHHAKKSEASGFCYVNDIVLAILELLKFHRRVLYVDIDVHHGDGVEEAFFTTNRVMTVSFHKYGDFFPGTGHITDVGAAEGKHYALNVPLSDGIDDTTFRGLFQCIIKKVMEVYQPDVVVLQCGADSLAGDRLGCFNLSVKGHADCLRFLRSYNVPMMVLGGGGYTIRNVARCWCYETAVAVGVEPDNKLPYNDYYEYFGPDYTLHIQPKSVENLNTTKDLENIKNMILENLSKIEHVPSTQFHDRPSDPEAPEEKEEDMDKRPPQRSRLWSGGAYDSDTEDPDSLKSEGKDVTANFQMKDEPKDDL

SEQ ID NO: 36 - protein, 458 aa, S. Bicolor
MAASGEGASLPSPAGGEDAHRRRVSYFYEPSIGDYYYGQGHPMKPHRIRMAHSLVVHYGLHRLLELSRPYPASEADIRRFHSDDYVAFLASATGNPSVLDPRAVKRFNVGEDCPVFDGLFPFCQASAGGSIGAAVKLNRGDADITVNWAGGLHHAKKSEASGFCYVNDIVLAILELLKFHRRVLYVDIDVHHGDGVEEAFFTTNRVMTVSFHKYGDFFPGTGHITDVGAAEGKHYALNVPLSDGIDDATFRDLFQCIIKKVMEVYQPDVVVLQCGADSLAGDRLGCFNLSVKGHADCLRFLRSYNVPMMVLGGGGYTIRNVARCWCYETAVAVGVEPDNKLPYNDYYEYFGPDYILHIQPKSVENQNTTKDLENIKNMILESLSKIEHVPSTQFHDRPSDPEAPEEKEEDMDKRPAQRSRLWSGGAYDSDTEDPDNLKSESKDVTANLQMKDEPKNDL

SEQ ID NO: 37 - protein, 458 aa, O. Sativa
MAASGEGASLASAAGGEDGRRRRVSYFYEPSIGDYYYGQGHPMKPHRIRMAHSLVVHYGLHRLLELSRPYPASDADIRRFHSDDYVAFLASATGNPALLDARAVKRFNVGEDCPVFDGLFPFCQASAGGSIGAAVKLNRGDADITVNWAGGLHHAKKGEASGFCYVNDIVLAILELLKFHRRVLYVDIDVHHGDGVEEAFFTTNRVMTCSFHKYGDFFPGTGHITDVGAGEGKHYALNVPLSDGIDDDTFRDLFQCIIKKVMEVYQPDVVVLQCGADSLAGDRLGCFNLSVKGHADCLRYLRSFNIPMMVLGGGGYTIRNVARCWCYETAVAVGVEPDNKLPYNDYYEYFGPDYNLHIQPRSVENLNSTKDLENIKSMILDHLSKIEHVPSTQFHDRPSDPEAPEQEEEDMDKRPPQRSRLWSGGAYESDTEDPDNMKTETNDLSASSVMKDESNDDS

SEQ ID NO: 38 - protein, 457 aa, B. Distachyon
MAASGEGASLPSPAGGEDGRRRRVSYFYEPTIGDYYYGQGHPMKPHRIRMAHSLVVHYGLHRLLELSRPFPASEADISRFHSEEYVSFLASATGNPNILDPRAVKRFNVGEDCPVFDGLFPFCQASAGGSIGAAVKLNRGDADITVNWAGGLHHAKKGEASGFCYVNDIVLAILELLKFHRRVLYVDIDVHHGDGVEEAFFTTNRVMTVSFHKYGDFFPGTGHITDVGAGEGKHYAVNVPLSDGIDDSTFRDLFQCIMKRVMEVYQPEVVVLQCGADSLAGDRLGCFNLSVKGHADCLRYLRSFNVPMMVLGGGGYTIRNVARCWCYETAVAVGVEPDNKLPYNDYYEYFGPDYNLHIEPRSVENLNTTKDLENIKNMILDHLSTLEHVPNTQFHDRPSDPEAPAEKEEDMDKRPSQRSRLWSGGAYDSDTEDPDMKTEANDLIANSIVKDESNDDL

SEQ ID NO: 39 - protein, 467 aa, P. trichocarpa
MEDITGGASLPSTGTDAKKRRVTYFYEPTIGDYYYGQGHPMKPHRIRMAHNLIVHYALHRRMEINRPFPAGPTDIRKFHSDEYVEFLSSVSPQSVGDPAFGRQLKRFNVGEDCPVFDGLFGFCQASAGGSIGAAVKLNRGDADIALNWAGGLHHAKKSEASGFCYVNDIVLGILELLKVHRRVLYVDIDVHHGDGVEEAFYTTDRVMTVSFHKYGDFFPGTGHIKDTGAGQGKSYALNIPLNDGMDDENFRGLFRPLIQKVMEVYQPDAVVLQCGADSLSGDRLGCFNLSVKGHADCLRFLRSYNVPLMVLGGGGYTIRNVARCWCYETAVAVGVEPDNKLPYNEYFEYFGPDYTLHVEPSNVENLNSPKDMERIRNILLEQLSRLPNAPSVPFQTTPPTTEVPEEAEEDMDQRPKRRIWNGEDFESDHDEDEKPGPRFFNADAQPNNKIRDGVDAMEEDKKEHPGL

SEQ ID NO: 40 - protein, 505 aa, B. Napus
METDESGVSLASGPDGRKRRVSYFYEPTIGNYYYGQGHPMKPHRIRMAHSLIVHYNLHRRLEISRPYLADAADIGRFHSPEYVDFLRSVSPESVGDSSARNLRRFNVGEDCPVFDGLFEFCRASAGGSIGAAVKLNRQDADIAINWGGGLHHAKKSEASGFCYVNDIVLGILELLKMFRRVLYIDIDVHHGDGVEEAFYTTDRVMTVSFHKFGDFFPGTGHIRDVGAEKGKYYALNVPLNDGMDDESFRSLFRPLIQKVMEVYRPEAVVLQCGADSLSGDRLGCFNLSVKGHADCLRFLRSYNVPLMVLGGGGYTIRNVARCWCYETAVAVGVEPDNKLPYNEYFEYFGPDYTLHVEPGPMENLNTPKDMERIRNTLLEQLSGLIHAPSVPFQHTPPVNRVLDEPEEDLEKRPKPRIWSGTANYESDSDDDEKPLGGFSGINGPTMDRDSTGEDEMEDDSAEPEKPFCFGLKTYLIGIAAIAKDALYTSVKTGFSAICSNTWIWE

SEQ ID NO: 41 - protein, 1453 aa, Arabidopsis thaliana
MEDDCEELQVPVGTLTSIGFSISNNNDRDKMSVLEVEAPNQVTDSRLGLPNPDSVCRTCGSKDRKVCEGHFGVINFAYSIINPYFLKEVAALLNKICPGCKYIRKKQFQITEDQPERCRYCTLNTGYPLMKFRVTTKEVFRRSGIVVEVNEESLMKLKKRGVLTLPPDYWSFLPQDSNIDESCLKPTRRIITHAQVYALLLGIDQRLIKKDIPMFNSLGLTSFPVTPNGYRVTEIVHQFNGARLIFDERTRIYKKLVGFEGNTLELSSRVMECMQYSRLFSETVSSSKDSANPYQKKSDTPKLCGLRFMKDVLLGKRSDHTFRTVVVGDPSLKLNEIGIPESIAKRLQVSEHLNQCNKERLVTSFVPTLLDNKEMHVRRGDRLVAIQVNDLQTGDKIFRSLMDGDTVLMNRPPSIHQHSLIAMTVRILPTTSVVSLNPICCLPFRGDFDGDCLHGYVPQSIQAKVELDELVALDKQLINRQNGRNLLSLGQDSLTAAYLVNVEKNCYLNRAQMQQLQMYCPFQLPPPAIIKASPSSTEPQWTGMQLFGMLFPPGFDYTYPLNNVVVSNGELLSFSEGSAWLRDGEGNFIERLLKHDKGKVLDIIYSAQEMLSQWLLMRGLSVSLADLYLSSDLQSRKNLTEEISYGLREAEQVCNKQQLMVESWRDFLAVNGEDKEEDSVSDLARFCYERQKSATLSELAVSAFKDAYRDVQALAYRYGDQSNSFLIMSKAGSKGNIGKLVQHSMCIGLQNSAVSLSFGFPRELTCAAWNDPNSPLRGAKGKDSTTTESYVPYGVIENSFLTGLNPLESFVHSVTSRDSSFSGNADLPGTLSRRLMFFMRDIYAAYDGTVRNSFGNQLVQFTYETDGPVEDITGEALGSLSACALSEAAYSALDQPISLLETSPLLNLKNVLECGSKKGQREQTMSLYLSEYLSKKKHGFEYGSLEIKNHLEKLSFSEIVSTSMIIFSPSSNTKVPLSPWVCHFHISEKVLKRKQLSAESVVSSLNEQYKSRNRELKLDIVDLDIQNTNHCSSDDQAMKDDNVCITVTVVEASKHSVLELDAIRLVLIPFLLDSPVKGDQGIKKVNILWTDRPKAPKRNGNHLAGELYLKVTMYGDRGKRNCWTALLETCLPIMDMIDWGRSHPDNIRQCCSVYGIDAGRSIFVANLESAVSDTGKEILREHLLLVADSLSVTGEFVALNAKGWSKQRQVESTPAPFTQACFSSPSQCFLKAAKEGVRDDLQGSIDALAWGKVPGFGTGDQFEIIISPKVHGFTTPVDVYDLLSSTKTMRRTNSAPKSDKATVQPFGLLHSAFLKDIKVLDGKGIPMSLLRTIFTWKNIELLSQSLKRILHSYEINELLNERDEGLVKMVLQLHPNSVEKIGPGVKGIRVAKSKHGDSCCFEVVRIDGTFEDFSYHKCVLGATKIIAPKKMNFYKSKYLKNGTLESGGFSENP

SEQ ID NO: 42 - protein, 1456 aa, Arabidopsis lyrata
MEDDCEELQVPVGTLTSIGFSISNNTDRDTMSVIKVEAPNQVTDSRLGLPNPDSICKTCGSKDRKVCEGHFGVINFQYSIINPYFLKEIAALLNKICPGCKYIRKKQFQITEDQPERCRYCTSNTGYPLMKFRVTTKEVFRRSGIVVEVNEESLMKLKKRGVLALPPDYWSFVPQDSNIDESCLKPTRRILTHAQVYALLSGIDQRLIKKDIPMFDSLALTSFPVTPNGYRVTEIVHQFNGARLVFDERTRIYRKLVGFEGNTLELSSRVIECMQYSRLFSENVSSSQDSANPYQKKSDTPKLCGLRFMKDVLLGKRSDHTFRTVVVGDPSLKLHEIGIPERIAKRLQVSEHLNNWNNERLVTFCSPNLFDNKEVHVRRGDRLVAIRVSDLQTGDKIFRNLMDGDTVLMNRPPSIHQHSLIAMTVRVLPTTSVVSLNPICCLPFRGDFDGDCLHGYVPQSIQAKVELDELVALDKQLINRQNGRNLLSLGQDSLTAAYLVNVEKNCYLNRAQMQQLQMYCPFQLPPPAIIKASPSSTEPQWTGMQLFGMLFPPGFDYTYPLNDVVVSNGELLSFSEGSAWLRDGEGNFIQGLIKHDKRKVLDIIYSAQEMLSQWLLMRGLSVSLADLYLSSDPQSRKNLTEEISYGLREAEQVCNKQQLMVESWRDFLAVNGEDEGEDSVARDLARFCYERQKSATLSKIAVSAFKDAYRDVQALAYRYGEQSNSFLIMSKAGSKGNIGKLVQHSMCIGLQNSAVSLSYGFPRELTCASWNDPNSPLRGAKGEDSTATESYVPYGVIENSFLTGLNPLESFVHSVTSRDSSFSGNADLPGTLSRRLMFFMRDIYAAYDGTVRNSFGNQLVQFTYETDGPVEDITGEALGSLSACALSEAAYSALDQPISLLETSPLLNLKNVLECGSKKGQREQTMTLYLSETLSKKKHGFEYGSLEIKNHLEKLSFSEIVSTSMIIFSPSTNTKVPLSPWVCHFHISEKVLKRKQLNVESVVSSLNEQYKSRNRELKLDIVDLDIQSTNHCSSDDKAMKDDSFCITVTVIEASKHSVLELDAIRLVLIPFLLDSPVKGSQEIKKVDILWTDRPKAPKRNGDHLAGELYLRVTMYGDRGKRNCWTALLETCLPIMDMIDWSRSHPDNIRQCCSVYGIDAGRSIFVANLESAVSDTGKTILKEHLLLVADSLSVTGEFVALNAKGWSKQRQVESTPAPFTQACFSSPSQCFLKAAKEGVRDDLQGSIDALAWGKVPGFGTGDQFEIIISPKVHGFTTPVNVYDLLSSTPPKTNSAPKSDKVTVQPFDLLGTAFLKGIKVLDGKGISMSRLRTIFTWENIEKLSQSLKRILTSYEINDPLNGRDEELVMMVLHLHPNSADKIGPGLKGIRVAKSKHGDSRCFEVVRIDGTFEDFSYHKCVLGATKIIAPKKVNLYKSKYLKNGTHQPGRLSENPQTVK

SEQ ID NO: 43 - protein, 1469 aa, Cucumis sativus
MEDEQDGELPIPSGLLTGINFSVSNQQDIENIAVITVDAANEVSDPKLGLPNPSYQCTTCGASSLKFCEGHFGVIKFPYTIIHPYFLSEVAQVLNKVCPGCKSVRQELWGKVEDPTSDYNRPKGCRYCFGSLKDWYPPMRFKLSTTDMFKKSMIMVEVKENMSKKYQKRVAKGGLPSDYWDFIPKDEQQEESYCRPNRKILTHAQVHYLLKDIDPKFLKKFVPAIDSLFLNSFPVTPNSHRVTEMAHSFSNGQRLIFDERTRAYKKVVDFRGTANELGSRVLDCLKISKAIYNIFVFCLNHVNYYQKKIKDTATSSSGLRWIKDVVLGKRSDHCFRMVVVGDPNIELSEIGIPCHVAERLQISEHLSSWNMKKLSTSCYLHLVEKGEIYVRREGRLVRVRNVLELNMGDTIYRPLADGDIVLVNRPPSIHQHSLIALSVKLLPVSAVLSLNPLCCSPFRGDFDGDCLHGYVPQSLEARVEVRELVSLDKQLTNGQSGRNLLSLSHDSLTAAHLILEDGVSLNLFQMQQLQMLTLHQLLPPAIVKSPLLRNCAWTGKQLFSILLPPDFDYSSPSHNVFIEKGELISSEGSYWLRDSGRNLFQALIEHCEGKTLDYLRDAQGVLCEWLSTRGLSVSLSDLYLSVDSYSHENMMDDIFCGLQEAEETCNLKQLMVDSHKEILIGNDEDNQHLLSIAVERLIYEKQKSAALNQASVDAFKKVFRDIQNLVYKYSGKDNSLLTMFKAGSKGNLMKLVQHSMCLGLQHSLVTLSFSLPHKLSCAAWNSQKMPRYIQKDGLPDRTQSFIPYAVVENSFLSGLNPFECFAHSVTNRDSSFSDNAEVPGTLTRKLTFLMRDIYTAYDGTVRNAYGNQLVQFCYDIDRPTSESESENNNRDRGIGGHPVGSLAACAISEAAYSALDQPISLLEASPLLNLKRVLECGSKRNSTKQTFSLFLSEKLSKRSYGFEYGALGVKNHLERVMFKDIVSSVMIIFSPLPSRKKHFSPWVCHFHVCKEILKKRRLKMNSVIHSLNMRCDSMRQEGRMNLPSLQIITQDCPLADSLTEDGDTVCLTVTIAENTKNSFLQLDFIQDLLIHFLLGTVIRGFTEIDRVDITWNDRPKVPKPRCSHGELYLRVTMSGEGNSRFWATLMNNCLPIMDLIDWTRSHPDNTHSLCLAYGIDSGWKYFLNSLESATLDVGKTIRLEHLLLVSNSLSATGEFVGLNVKGLTHQREHALVKTPFMQACFSSPGACMIKAAKAGIKDNLSGSLDALAWGRMPSLGTGGQFDILYSGKGHELNKPVDVYNLLGGQSTCEKQNTKIESLDKNTISEKYSAQLMLKNGGSTIKGLKRLDSVSKSILRKFLTLNDIQKLSFALRTILHKYSLNERLNEVDKSTLMMALYFHPHRDEKIGVGAQDIKVGSHSKYQNTRCFVLIRSDGTTEDFSYHKCVLGALEIIAPHRVKGYQSKWMQEKFE

SEQ ID NO: 44 - protein, 1458 aa, Vitis vinifera
MDNDFLEEQQVPSGLLIGIKFDVSTEEDMEKISVMKIDAVNEITDPKLGVPNPSCQCSTCGAKDTKKCEGHFGVIKFPFTILHPYFLTEVVQILNKICPGCKSTRQGQWVKGADSGSRRLRSKGCKYCAANSNDWYPTMKFKVSSKDLFRKTAIIVEMNEKLPKKLQKKSFRPVLPLDYWDFIPKDPQQEENCLNPNRRVLSHAQVHYLLKDIDPGFIKEFVSRMDSFFLNCLPVTPNNHRVTEITHALSNGQTLIFDQHSRAYKKLVDFRGTANELSCRVLDCLKTSKLRSEKSTSKDSASKMSGLKWIKEVLLGKRTNHSFRMIVVGDPKLRLSEIGIPCHIAEELLISEHLNSWNWEKVTNGCNLRLLEKGQTYVRRKGTLAPVRRMNDFQAGDIIYRPLTDGDIVLINRPPSIHQHSVIALSVKVLPLNSVVSINPLCCSPFRGDFDGDCLHGYIPQSVDSRVELSELVALNRQLINRQSGRNLLSLSQDSLSAAHLVMEDGVLLNLFQMQQLEMFCPYQLQSPAIIKAPLLDTQVWTGKQLFSMLLPPGFNYVFPLNGVRISDGELISSSDGSAWLRDIDGNLFSSLVKDCQGKALDFLYAAQEVLCEWLSMRGLSVSLSDIYLSSDSISRKNMIDEVFCGLLVAEQTCHFKQLLVDSSQNFLIGSGENNQNGVVPDVQSLWYERQGSAALCQSSVCAFKQKFRDIQNLVYQYANKDNSLLAMLKAGSKGNLLKLVQQGLCLGLQHSLVPLSFKIPHQLSCAAWNKQKVPGLIQNDTSEYAESYIPYAVVENSFLMGLNPLECFVHSVTSRDSSFSDNADLPGTLTRRLMFFMRDLYIAYDGTVRNAYGNQLVQFSYNIEHTSTPSDGINEDTCAYDMGGQPVGSISACAISEAAYSALDQPISLLEPSPLLNLKRVLECGLRKSTADRTVSLFLSKKLEKRKHGFEYGALEVKNHLEKLLFSDIVSTVMIVFSPQNGSKTHFSPWVCHFHVCEEIAKKRSLKPHSIIDALYMKCNSARAESKINLPDLQITSKDCFVDMEKEDSDCFCITVSIVNSKKSCIQLDTVRDLVIPFLLGAVVKGLLDVKKVDILWNDNPDSDVLKSSSGRLYLRVYVSGDCGKKNFWGVLMDACLQIMDMIDWERSHPDNIHDIFVVYGIDAGWKYFLNSLKSAISDIGKTVLPEHLLLVASCLSATGEFVGLNAKGMARQKELTSISSPFMQGCFSSPGSCFIKAGKRAVADNLHGSLDALAWGKIPSVGSGGHFDILYSAKGHELARPEDIYKLLGSQTSCHEQNLKVKVPITCYQTTTKCGAQLVYANGDSASKGCKSLEKISKSVLRSFLSLNDIQKLSRRLKFILQKYPINHQLSEIDKTTLMMALYFHPRRDEKIGPGAQNIKVRYHSKYHNTRCFSLVRTDGTEEDFSYHKCVHGALEIIDPRRARSYQSRWLPYSEV

SEQ ID NO: 45 - protein, 1519 aa, Medicago truncatula
MDDEDLATVHKVPSALIKAIKFEVLTGEDIEKISALEINAPGQVTCSDLGLPNSSYGCTTCGSKDRKSCEGHFGAIKFPFTILHPYFMAEIAEILQKICPACKSIRQEIRVKRAKSLLGYNNQPKGCKYCCGNGMGRYPAMKFRVSSNDFFRRTAIIVEVNDISLNKKRNLGRGLPADYWDFILGDVQQEENHVNRKVLSPVQVENLLSGVDPNFIEKFIPSMDLVGLSCFLVAPNCHRVTEVPHRLSGGYPLSFDNRTRACKKLVDFRGTANELSSRVLDCLRFSKINPDRTPVNIFTELQQRKVGENACNSSGLRWMKDVVLGKRNDCTFRTVVVGDPDLELSEIGIPCQIAEALQVSEYVNRQNRQNLLYCCELRLLEKGQINVRRNGNPVVLYKKEDLQIGDIFYRPLVDGDKVLINRPPSIHQHSMIALTVRVLPISSVVSINPICCSPLRGDFDGDCLHGYIPQSVGARVELNELVALDRQLINGQSGGNLLSLSQDSLTAAHLLLEDGVGFNIYQVQQLEMLCNKELTSPAIFKAPSSNTPFWSGKQLFSMLLPSKFDYAFPSNDVFVKDGELISCSESSGWLRDSENNVFQSLVEHFQGKILDVLHGAQKALCEWLSMTGFSVSLSDLYLSSDSYARKNMMEEISYGLRVAEQACDFNQLLVDHYSDFLSASPEENEKFVTVDVDRLNHERQISAAQSQASVDAFRHVFRNIQSLADKHACKDNSFLAMFKAGSKGNLLKLVQHSMCLGLQHSLVRLSYRIPRELSCAGWNSQKGLHSMEMSSDTLEPKQSYIAHAVVESSFLTGLNPLECFVHSVTNRDSSFSDNADLPGTLTRRLMFFMRDMYDAYDGTVRNLYGNQLIQFSYDAEEDSSCDSYFREDIIGGEPVGALSACAVSEAAYSALSQPISLLEASPLLNLKNVLECGSRKKGGDQTVSLFLSEKIGKQRNGFEYAALEVKNYLERYMFSNIVSTVMIIFTPQHCSQVKYSPWVCHFHLDKENVTRRKLEVHSIIDSLYQQYDSFRRESKVILPSLKISSKKWCVDYKANEGGETSVGNEKDGEDCITVAVVEDSKNSVQLDSVRKSLIPFLLQTAIKGFLEIKKVDILWKDLPKVTKSYNGSAGELYLRVTMSSGNDNGTFWGRLINHCHRIMPLIDWTRSHPDNIHHFCSAFGIDAGWQHYFHNLSSATSDTGKSILPKHLRLVANSLSASGEFVGLNAKGMARQRKHASVSSPFVQACFSNPGSSFLKAAKSGIVDNLQGNLDALAWGNCLPMGTGGQFDIIYSEKVEEINKSVDVYGLLETSFNQMDQEINIPQSRKYSSGKCSSDFRSKNGGYTPKEPKQWKSVLRNFMTANDIQRLTFDARVILNKYQIDETLSETDKLTIMKVLHFHPRRDEKFGSGPQNIKVGWHPEFTDSRCFFIIRKDGSVEDFSYRKCILGALDIIDPKKSKIQRNRWSGNGDMEAKKWSGNGDMEAKKWSGSYDKEAKKWSQSYDKEAKKWSGNDDVEVTSI

SEQ ID NO: 46 - protein, 1475 aa, Ricinus communis
MEADLFEERQQLPSALLTAITFGVSTEAEKEKLSVLTIDTVSEVTDSKLGLPNPTNQCSTCGSKDLKSCEGHFGVIKFPFTILHPYYLSEVVRILNQVCPKCKSIRKESKVRCLNHLNPKLPVLLILLCWYPAMKFSVSSEEIFRKNVIIAKFSERPTNKSQKRGFKKKLAADYWDIIPKDEQQEENITRPNQRVLSHAQVIHLLENIDPNFIRKFVLKRDSIFLNCFSVTPNCHRVTEVTHAFSNGQRLVFDDRTRAYKKMVDFRGIAKELSFRVLDCLKTSKINPDKSVNNDDYMALQRKMNDSSSSSSGLRWIKDVVLGKRNDNSFRMVVVGDPNIKFSEIGIPCPIAERLQISEHLTTWNWDKLNTCCEVRLLEKGDMHVRREGKLVRVRRTKELRIGDIIYRPLNDGDTVLINRPPSIHQHSLIALSVKVLPATSVLAINPLICAPFRGDFDGDCLHGYVPQSVDTRVELRELVALDKQLINVQNGRNLLSFSQDSLVAAHLVMEDGVLLSLQQMQQLQMFCPHQLFSPAVRKAPSLNGCAWTGKQLISMLLPRGFDHECPSSDVYIRDGELISSEGSFWLRDTDGNLFQSLIKQCQDQVLDFLYIAQEVLCEWLSMRGLSVSLSDLYLCPDSDSRENMMDEVLFGLQDAKGTCNMKQFMVDSCRDFLASIDEDEQYSVNFDVEHLCHEKQRSAALSQASVDAFKHVFRDIQTLGYKYASKDNALMAMFKSGSKGNLLKVVQHSMCLGLQHSLVPLSFRMPLQLSCDAWNKQKAENAVECARSYIPSAVVEGCFLTGLNPLECFVHSVTSRESSFSDNADLPGTLTRRLMFFMRDVHAAYDGSVRSAYGNQLIQFSYNIDEGRSAETYGTAKIVDNYDGMAGKPVGSLAACSISEAAYSALDQPISLLEKSPLLNLKNVLECGLKKSNAHKSMSLFLSEKLGRRRHGFEYGALKVQDHLERLLFSDIVSVSRIIFSSQSESKTCFSPWVCHFHVYKEIMKKRNLNVDSIINILNGRCKSNTNLPNVQISCKSCSIADNHREKEETLCITVTIVERSKNSSTRLATIQDLMIPFLLETVLKGLMEINKVDILWKDWPRISKTHNQPYGELYLRVSMSADSEKTRLWNLLMDYCLPIMDMIDWTCSRPDNVRDFSLAYGIDAGWKFFLQRLESAISDVGKSVLPEHMLLVANCLSVTGEFVGLNAKGWKRQREDASVSSPFVQACFSSPGNCFIKAAKAGVKDDLQGSLDALAWGKVPSVGTGQFDIVYSGKVKLLLFLLVKRVKLKTPPSFVVLTVFLETPLINLLVWYSVDQQLNEADKCTLTMALYFHPRKEEKIGSGFKDIKVVKHPEYQDSRCFSLVRSDGTIEDFSYRKCVYGALEIIAPHKARSQIEFFQNSDVVAIIGRITYKLFVGQSEVKELPWEVVHACGLGKHSNRVISMLCYVQGSCKVDLALCNGLGRRLALVTANRA

SEQ ID NO: 47 - protein, 1458 aa, Glycine max
MDDDLLQRNKTPSVVIKAIKFDVLTEEDIENISVLEINAAGQVTGSNLGLPNASDECATCGTKDKKFCEGHFGVIKFPTPILHPYFMLEIAHILNKICPVCKSIRHKSKGARLIYGTKRSNDCNYCSVYPSMQFRVSSNDLFRRTAIIVEVKASKKTLGTEIPADFWNFIPCDAQQEENYVNRRVLSPVQVNYLLNDVDPDFIEKYIPRKNLLCLNCFPVTPNCHRVTEVPYAISSGSRLSFDDRTRSCKKLVDFRGTANELSSRVLDCLRISKLNPDKTPNSIFADIQQRKIGENAFNSSGLRWIKDVVLGKRNDSSFRTVVVGDPDLELSEIGIPCHIAESLQVSEYVNRQNREKLLYCCELHLLEKGKINVCRKGSIVHLYKKEDLQIGDKFYRPLADGDKVLINRPPSIHQHSMISLTVRVLPISSVVCINPLCCSPLRGDFDGDCLHGYIPQSVTARIELNELVALDRQLINGQSGRNLLSLSQDSLTAAYLLMEDGVLLNVYQMQQLQMLSISNKRLIPPAVVKAPSSNSSLWNGKQLFSMLLPYDFDYSFPSDGVVVSDGELVSSSEASGWLRDSDYNVFQSLVEHYQGKTLNFLYAAQKVLCEWLSMTGFSVSLSDLYLSSDSYARENMIEEIFYGLQDAERACNFKQLLLDYYCDFLSGSLQESENAITVNADRLNYERQISASLSQASVDAFRQVFRNIQSLADKYACKGNSFLAMFKAGSKGNLLKLVQHSMCLGMQNSLVRLSYRLPRHLSCADWNSQKWVDSIQMSSGTLESVQSYIPYAVVESSFLTGLNPLECFVHSVTNRDSSFSDHADLPGTLTRRLMFFMRDLYDAYDGTVRNLYGNQLIQFSYDIEEDSSCNKGFQQYALGGESVGAISACAISEAAYSALGQPVSLLETSPLLNLKNVLECGSRKRNGDQTVSLFLSEKLGKQRHGFEYAALEVKNYLERLLFSNIVSKVMIIFTPHDSRSQEKYSPWVCHFHLDKEIVTRRKLKVHSIIDSLYQRYYSQRKDSKVCFTNLKISSSRKCSADSMVKEGEDTSIDKEEGDDCIMVTIVENSKNPIQLDSVRDLVIPFLLGTAIQGFLDVKKVDILWNNQSKVTNSRNGFSGELYLRVTLSSEGSRGRFWGVLLKLCHKIMHIIDWTRSHTDNINHFSSAYGIDAGWQYFFNSLACATSDTGKSILPKHLCLVANSLSCSGEFVGLNAKGMALQRKHASVSSPFVQACFANPGSCFIKAAKSGATDNLQGSLDGLAWGNCLSMGTSGMFDVIYSEKGHQVAKSVDVYELLEASFDKPNNKIGTHLHKYSSDKCGSEFRHKNGYALKEGKQWKTILRNFVTVNDIQKLTFASRCILNKYSIDELLSESDRSTMLRVLNFHPHKSEKFGIGPQDIKVGWHPKYKDSRCFHIIRTDGTVEDFSYRKCILGALDIVDPKKSKIQEKKWSGHGDT

SEQ ID NO: 48 - protein, 1444 aa, Zea mays
MELHREPPEAILNAIKFDLMTSTDMEKLSSMSIIEVSDVTSPKLGLPNGSLQCETCGSQRGRDCDGHFGVTKLAATVHNPYFIDDVVHFLNRICPGCLSPREGIDTKRLEREKVQATCKYCSKDGSKLYPSIVFKTLSSPRVLLFKSKLHRNASVMERISIVAEAADRMPNRSKGKGSLEGLPLDFWDFVPSENKQVQSNMTKIILSPYQVFYMLKKSDPELIKQFVSRRELLFLSCLPVTPNCHRVVEIGYGLPDGRLTFDDRTKAYKRMVDVSRRIDDYRQHPHFSVLASSLVSSRVSECLKSSKLYSKKADGETSTDTYGMKWLKDVVLSKRSDNVFRSIMVGDPKIKLWEIGIPEDLSSSLVVSEHVSSYNFQSTNLKCNLHLLAKQELFIRRNGKLMFLRKADQLEIGDIAYRPLQDGDIILINRPPSVHQHSLIALSAKILPIHSVVSINPLCCTPFAGDFDGDCLHGYIPQSIRSRVELEELVSLHNQLLNMQDGRNLVSLTHDSLAAAHLLTSTDVFLKKSELQQLQMLCLSVSTPAPAVIKSMNFQGSLWTGKQLFSMLLPSGMNFSCDTELHIMDSEVLTCSLGSSWLQNNTSGLFSVMFKQYGCKALDFLSSAQEVLCEFLTMRGLSVSLSDLYMFSDHYSRRKLAEGVKLALYEAEEAFRVKKILLDPINIPVLKCHDETEDVTYRQSDCIQSNPSVIRSSIMAFKDVFRDLLKMVQQHVSNDNSMMVMINAGSKGSMLKYAQQTACIGLQLPASKFPFRIPSQLSCISWNGQKSLNYEAESTSERVGGQNLYAVIKNSFIEGLNPLECLLHAISGRANFFSENADVPGTLTRKLMYHLRDIHVAYDGTVRSSYGQQIVQFSYDSVDDLVDKLGAPVGCRAACSISEAAYGALEHPVNGLEDSPLMNLQEVFKCHKATNSGDHIGLLFLSRHLKKYRYGLEYASLEVKNHLERVNFSDLVETIMIIYDGHDKIRNEGMWTTHFHINKAMMKKKRLGLRFVVDELAKEYDTTRDQLNNAIPSIRISRRKCLVGDEGVKSSSCCIAVVAHAERNSISQLDTIKTRVIPSILDTLLKGFLEFKDVEIQCPHDGELLVKVCMSEHCKGGRFWPTLQNACIPVMELIDWELSQPSNVSDIFCSYGIDSAWKYFVESLKSATTDTGRNIRREHLLVIADSLSVTGQFHALSSQGLKQQRTRLSISSPFSEACFSRPAQSFINAAKQCSVDNLCGSLDAVAWGKEPFNGTSGPFEIMHSGKPHEPEQNESIYDFLCSSKVRNFEKNHLDTRRQSTENASICRLACKSSKGSTTVNGVAITIDQDFLHAKVSIWDNIIDMRTSLQNMLREYPLNGYVAEPDKSQLIEALKFHSRGAEKIGVGVREIKIGLNPSHPGTRCFILLRNDDTTEDFSYHKCVQGAADSISPQLGSYLKKLYYRA

SEQ ID NO: 49 - protein, 1203 aa, S. Bicolor
MELHRELPEATLNAIKFDLMTSTDMEKLSSMSVIEVSDVTSPKLGLPNASPQCETCGSKSGRDCDGHFGVTKLAATVHNPYFIDDVVHFLNQICPGCLSPREGINMKKDGSKLYPSVIFKTLSSPRVLLSKSKLHRSPSVMERISIVAEAAERVSNRSKGKGLLEGLPQDYWDFVPSENKQVQSNMTKIILSPYQVFHMLKKSDPELIKQFVSRRELLFLSCLPVTPNCHRVVEIGYGLSDGRVTFLYSKKTDGETSTDPSGMKWLKDAVLSKRSDNAFRSTMVGDPKIKLWEIGIPEDLASNLVVSDHVNSYNFENINLKCNLHLLTKEELFIRRNGKLMFLRKADQLEIGDIAYRPLQDGDLILINRPPSVHQHSLIAFSAKILPIHSVVSINPLCCTPFLGDFDGMKFSCDRMLHILNGEVLTCSLGSSWLQNNTSGLFSVMFKQYGCKALDFLSSAQEVLCEFLTMRGLSVSLSDMFSDHYSRRKLTEGVKLALDEAEEAFRIKQILLDPINIPVLKCQDETEDVTYRQSDCIQNNPSVIRSSIMAFKDVFSDLLKMVQQHVSNDNSMMVMINAGSKGSMLKYAQQTACVGLQLPASKFPFRVPSQLSCIRWNRQKSLNYEAEGTNERVGGQNLYAVIRNSFIEGLNPLECLLHAISGRANFFSENADVPGTLTRKLMYHLRDIHVAYDGTVRSSYGQQIVQFSYDSADDPEVFKCHKATNSGDHIGLLFLSRHLKKYRYGLEYASLEVKNHLEQEMMKKKRLGLRFVIEELTKEYNATRDQLKNAIPSICISRRKCVVGDEGVKISACCIAVVALAEPNSMSQLDTIKKRVIPIILDTLLKGFLEFKDVEIQCQHDGELLVKVCMSHHCKGGRFWATLQNACIPVMELIDWELSRPSNVADIFCSYGIDSAWKYFVESLKSATTDIGRNIRREHLLVIADSMSVTGQFHAISSHGLKQQRTRLSISSPFSEACFSRPAQSFIDAAKQCSVDNLCGSLDAIAWGKEPFNGTSGPFEIMHSGKPHEPEQDESIYDFLRSPKVQNVEKNHLDTRRQSTENASICRLACKSKGSATVNGVAITSDQDFLHAKVSIWDNIIDMRASLQNMLREYPLNGYVMEPDKSKLIEALKFHPRGAEKIGVGVREIKVGLNPNHPGTRCFILLRNDDTTEDFSYHKCVHGAANSISPQLGSYLKKLYHRA

SEQ ID NO: 50 - protein, 1623 aa, O.sativa
MLLEPELSPGSLGTRTRGEGWMEEPSLEVNNPVAELNAIKFSLMTSSDMEKLSSATIIEMCDVTNAKLGLPNGAPQCATCGSRSIRDCDGKKKLTGKLLGHFGVIKLAATVHNSYFIEEVVQLLNQICPGCLTLKQNGDTKKADGTTIQGTCKYCSKDGSKLYPSIIFKMLTSPRVTLSRSKLHRNTSVMDKMSIIAEVAGGVAHKSKNKAPHETLPQDFWDFIPDDNQPPIFNVTKKILSPYQVFHMLKKLDPELINQDDRTKAYKRMVDLYSKKSDDESSASTDTYGTKWLKDIILSKRSDNAFRSIMVGDPKINLNEIGIPMGLALNLVVSEQVSSYNFETINLKCNLHLLTKEVLLVRRNGNLIFVRKANQLEIGDIAYRLLQDGDLVLVNRPPSVHQHSLIALSAKLLSTQSAVSINPLCCDPFKGDFDGDCLHGYIPQCLQSRIELEELVGLSGQLLNQQDGRSLVSLTHDSLAAAHQLTNADVFLEKAEFQQLQMLSSSISLTPMPSVFKSTNSQGPLWTGKQLFGMLLPYGMNISFDQKLHIKDSEVLTCSSGSFWLQNNTSSLFSVMFKEYGCKALEFLSSTQDVLCEFLTMWGLSVSLSDLYLFSDHYSRRKLSEEVHLALDEAEEAFQIKQILLNSVSIPNLKYYDGGDDRSNTDEQSGFTQVSLPIIRSSMTSFKSVFNDLLKMVQQYVSKDNSMMTMINSGSKGSVLKFVQQTACVGLQLPASKFPFRIPSQLSCVSWNRHKSLNCEITDGTSECVGGQDMYAVVRNSFLDGLNPLECLLHAISGRANFFSENADVPGTLTRKLMYHLRDTYVAYDGTVRSSYGQQIVRFSYDTADGMYSDHDLEGEPGAPVGSWAACSISEAAYGALDHPVNSLEDSPLMNLQEVLKCHKGTNSLDHTGLLFLSKHLRKYRYGFEYASLEVKDHLERVDFSDMVDTVIILYGGSDMQKTKGNPWITHFHLNQETMKIKRLGLEFIVREIIDQYNTLRKQLNNAIPSVSISNSETLHLKMENKSGKLGKNLGTGNECVKNQTCCVTMVVQVEINSMSQLDVIKERVIPSILATLLKGFLEFKNVKVQCQEDNELVLKVGMSEHCKSGKFWATLQNACIPIMELIDWERSRPERVYDNFCSYGIDSAWKFFVESLRSTTDAIGRNIHRQHLLVVADCLSRPAHSFINAAKRDSVDNLSGTLDAIAWGKEPCAGSSGPFKILYSGKSHETKQNEHIYDFLHNPEVQALEKNVMDTYRKRTEKTSKRRSALNSEGNATINGGAISFNQKFLNAKVGIWENIIDMRTSLQNMLREYTLNEVVTEQDKSCLMEALKFHPRGYDKIGVGIREIKIGVNPGHPSSRCFIVLRNDDTTADFSYNNRFPCRYLHSELPEAPPERLRPSHRPSAAACGGGGGGNCVVSSTREKPCKFFLSGDCRYGDECRCYLHAGSINDGFSLLTPLRGHQKEPLLFVGIPDAVKIWDTGAEMSLSEPTGEYMHWRLAMGCSSLQCNYTSLGCYGKLETGSLAVTYTHNEDHGALALAGMQDAQLNPILLWSTNYNIVHLYELPSMEEQVRKAVFLNRETFGSQFALAISRIPYSVVEEYTSTGLEELFADVGTWKKQN

SEQ ID NO: 51 - protein, 1470 aa, B. distachyon
MSEWTDGPNNEMDVPMAELKALKFDLLSSADIETLSSANIIEASDVTSAKLGLPNAAPQCVTCGSQNVRDCDGHSGVIKLPATVYSPYFLEQLVQFLNQICPGCWTPKQNRDTKRSDAATIQEPCKYCSKDGLYPSVIFKVLTSPRITLSKSKLQRNTSVMDKVSVTAEVINMSKNKSSLEVLPHDYWNFVPHNQPPQPNTTKILLSPYQVFHILKQVDLELITKFAPRRELLFLSCLPVTPNRHRVAEMPYRFSDGPSLAYDDRTKAYKRTVDASKKIDDYRQHPQFSVLASSFVTSRVMECLQSSKLYSKKTDKESSTDSYGTSVKKNDSYGTKWLKDAILSKRSDYAFRSIMVGDPKIRLHEIGIPMDLADLFVPEHVSIYNFKSINLKCNLHLLAKELLIARRNGKLIYVRKENQLEIGDIVYRPLQDGDLILVNRPPSVHQHSLIALSAKLLPVQSVVAINPLNCAPLSGDFDGDCLHGYVPQSIGSRVELGELVSLSHQLLNMQDGRSLVSLTHDSLAAAHLLTSSGVLLNKTEFQQLQMLCVSLSPTPVPSVIKSINPQGPLWTGKQLFGMLLPSGMNFSPDPKLHIKDSEVLACSGGSFWLQNNTSGLFSVLFKQYGGEALEFLSSAQDMLCEFLTMRGLSVSLSDIYLFSDHYSRRKFAEEVNLALDEAEEAFRVTQILLSPNFIPHLKCYDDCDDLSDSYEQSDFVQSNLPIIKSSIMAFKSVFSDLLKMVQQHTPKDNSMMAMINAGSKGSMLKFVQQAACVGLQLPAGKFPFRIPSELTCASWNRHKSLDCDISEGARKRLGGQNSHAVIRNSFIEGLNPLECLLHSISGRANFFSENADVPGTLTKNLMYHLRDIYVAYDGTVRSSYGQQIVQFTYDTAEDIYTDCGQEGEFGAPVGSWAACSISEAAYGALDHPVNVIEDSPLMNLQEVLKCQKGTNSLDHFGLLFLSKNLKKYRYGFEYASLYVQNYLEPMDFSELVNTVMIQYDGGGVQKTKGSPWITHFHISKEMMKRKRLGLRLLVEDLTEHYNAKRDQLNNVIPKVYISKCKCSDDDDCINNQTCCITVVAQDESNSTSTSQLDDLKKRAIPVLLATPVKGFLEFKDVEIQCQRDNELVVKVNMSKHCKSGIFWTTLKKACIGIMGLIDWERSRPGSVYDIFCPCGIDSAWKYFVESLRSKTDDIGRNIHREHLLVVADTLSVSGQFHGLSSQGLKQQRTQLSTSSPFSEACFSRPADTFIKAAKQCSVDNLCGNIDALAWGKEPPAGTSGPFKIMYAGKPHEPVQNENIYGFLHNPEVWGPEKNHMETDSTRTKNASERWSSGNATFNGGTISVEQNYLGAKVGVWDSIIDMRTCLQNMLREYQLDEYVVELDKSRVIEALRFHPRGREKIGVGIRDIKIGQHPSHPGTRCFILVRNDDTTEDVSYKKCVQGAADSISPQLGSHMEKILQTRSFCRDSWR

SEQ ID NO: 52 - protein, 1109 aa, Populus trichocarpa
MLKDVDPNFIKLSILKTDTIFLNCFPVTPNSHRVTEVTHAFSNGQRLIFVRTVSSTTSFVLVVLDCMSQQLGKLPKLFSCAHCACRMNGLGLTKKWLISEGWIKDVVLGKRNDHSFRMVIVGDPHLQLHEIGIPCHIAERLQVSESLTAWNWEKLNACFEKSRFEKGDMHVRREGNLVRVRHMKELRLGDIIYRPLNDGDTVLINRPPSIHQHSLIALSVKVLPVPSVLAINPLCCPPFRADFDGDCLHGYVPQSVDTRVELTELVSLDKQLTNWQSGRNLLSLSQDSLTAAHLVLEDDVFLSSFELQQLQMFRPERFLLPAVKAPSANALVWTGKQLISMLLPVGFDHDFPSCNVCIRDGDLVSSEGSFWLWDTDGNLFQSLVKHCHGQVLDFLYAAQRVLCEWLSMRGLSVSLSDLYLCPDSNSRKNMMDEIWYGLQDADYACNLKHLMVDSCRDFLTGNNEEDQCNVERLRFLSGCSEEDYCVMAFDGERLCYEKQRSAALSQSSVDAFRLVFRDIQSLVYKYASQDNSFLAMFKAGSKGNLLKLVQHSMCLGLQHALASLSFRIPHQLSCAGWNKQKADDATESAKRYIPHAVVEGSFLSGLNPIECFVHSVTSRDSSFSDNADLPGTLFRRMMFFMRDLHGAYDGTVRNAYGNQLVQFSYNIDDMDPSGSVDEINNSDGIAGRPVGPLAACAISEAAYSALDQPISLLEKSPLLNLKNVLECGLKRNSAHQTMSLFLSEKLGRQRHGFEYAALEVQNHLERLLFSDIVSFVRIIVFHLDEIMTYHYHLCPFLVLDSLQNLSKSARRSVVLSDLVIKCQTIQDLMIPFLLETVIKGFMEIQKVDILWNDKPKIPKSHNRLRGELFLRVHMSRGSDKTRLWNQLMDDCLSIMDLIDWARSHPDNIHECCLAYGIDAGWKFFLNNLQSAMSDVGKTVLPEHLLLVANCLSVTGEFVGLNAKGLKRQREHASVSTPFVQACFSNPGDCFIRAAKAGVVDDLQGSIDALAWGKVPAIGTGQFDIVYSGKFKSDAYHVDYLAKILEYQDTRCFSLVRTDGTIEDFSYRKCLHNALEIIAPQRAKRYCEKYLTSKVSATDNSGCTDLPLDN

SEQ ID NO: 53 - protein, 1444 aa, B. napus
MEEECEELQVPMGILKSIRFSISNNKDRKNMAVMDVEAANQVTDSRLGLPNPDSICRSCGSKDRKVCEGHFGVINLKYPVINPYFLKEIATLLNRICPGCKYMRKKQSQSSEDRPERCRYCTSNTGYPLMRFRVTTKEVFRRSGIVCEVSEDNLFKLSKRGLSSLPPDYWEFLPKDSNIDESCLKPSRRILTHAQVYALLCGIDERLIRKDIPMFDSLPLTSFPVTPNGHRVSEMVNQFTGARLIFDERTRIYKKLVGFEGNGLELSARVIECMQYSRLFSENMSPSQESANPYQKKSDTPKLCGLRFMKDVLLGKRSDHTLRTVVVGDPCLKLNEIGIPRRIAERLQVSENLNDWNRERLVTSCFHKLLERGETHVRRGGSLVAIRVIEDLQTGDSILRTLKDGDTVLMNRPPSIHQHSLIAMSVKVLPTTSVVSLNPICCLPFRGDFDGDCLHGYVPQSIQAKVELDELVALDKQLVNRQNGRNLLSLGQDSLTAAYLVSVETNCFLNRAQMQQLQMYCPFELPPPAIIKASSSEAQWTGMQLFGMLLPPGFEYTYPLNDVVVSNGGLLSSSDGSGWLRDGEGNFIQGLLKEHKEKVLDIMYSTQEMFSQELQMRGLSVSLADLYLASDPESRRNLTEEISYGLQEAEQVCNKQQLMVESRRDFLAGNVEDMAADLDRFCYERQRSATLSKLAVNAFKDAYRDVQSLAYRYAAESNSFLIMSKAGSKGNMGKLAQHSMCIGLQNSSVALSFGFPRQLTCASWNDPNSPLRGAKRQDQTGHESFVPFAVIENSFLTGLNPLESFVHSVTSRDSSFSGNADIPGALNRKLMFFMRDIYAAYDGTVRNSFGNHLVQFHYETEEDITGEAVGSLSACALTEAAYSALDQPISLLETSPLLNLKNVLECGSKKGLKEQTMSLYLSETLSKKKHGFEFGALDIKSHLEKLSFSEIVSTSMIIFSPRTNTKMPMSSWVCHFHISKKVLKQKQLDVESVVSSLNKQYANRKKELKLDVIDLEIQSTNHCSWDDKSMEDDRFCITVTVLEASTHGSLELDAIRLVLIPFLLDSPVKGYGEIKKVEILWADRPKAPKRNKKHMAGELFVKVTMHGVRGKKNIWSALLETCLPIMDMIDWTRSHPDNIRQCCSVYGIDAGRSIFLADLESAVADTGKGMLREHLLLVADCLSVTGEFVALNPKGWSKQRQAESTPAPFTQACFSSPSQCFLKAAKEGVTDELQGSIDALAWGKVPSFGTGDQFEIIISPKDHGFSSTPVDVYDFLSSTATLPKRKASSLPKSDNFTVQPFPLLDTALSKAVKTLDGKGLTRSQLRTIFTWDDIEKLSRSLKRILYNYEIDATLNERDERLLMMALLFHPNRDEKLGPGFRGIKVANSKHGNARCFEVVRTDGTTEDFSYHKCVLGATEIIAPKRVNFYKAKYLRNGTVQAGAI

SEQ ID NO: 54 - protein, 1976 aa, Arabidopsis thaliana
MEEESTSEILDGEIVGITFALASHHEICIQSISESAINHPSQLTNAFLGLPLEFGKCESCGATEPDKCEGHFGYIQLPVPIYHPAHVNELKQMLSLLCLKCLKIKKAKGTSGGLADRLLGVCCEEASQISIKDRASDGASYLELKLPSRSRLQPGCWNFLERYGYRYGSDYTRPLLAREVKEILRRIPEESRKKLTAKGHIPQEGYILEYLPVPPNCLSVPEASDGFSTMSVDPSRIELKDVLKKVIAIKSSRSGETNFESHKAEASEMFRVVDTYLQVRGTAKAARNIDMRYGVSKISDSSSSKAWTEKMRTLFIRKGSGFSSRSVITGDAYRHVNEVGIPIEIAQRITFEERVSVHNRGYLQKLVDDKLCLSYTQGSTTYSLRDGSKGHTELKPGQVVHRRVMDGDVVFINRPPTTHKHSLQALRVYVHEDNTVKINPLMCSPLSADFDGDCVHLFYPQSLSAKAEVMELFSVEKQLLSSHTGQLILQMGSDSLLSLRVMLERVFLDKATAQQLAMYGSLSLPPPALRKSSKSGPAWTVFQILQLAFPERLSCKGDRFLVDGSDLLKFDFGVDAMGSIINEIVTSIFLEKGPKETLGFFDSLQPLLMESLFAEGFSLSLEDLSMSRADMDVIHNLIIREISPMVSRLRLSYRDELQLENSIHKVKEVAANFMLKSYSIRNLIDIKSNSAITKLVQQTGFLGLQLSDKKKFYTKTLVEDMAIFCKRKYGRISSSGDFGIVKGCFFHGLDPYEEMAHSIAAREVIVRSSRGLAEPGTLFKNLMAVLRDIVITNDGTVRNTCSNSVIQFKYGVDSERGHQGLFEAGEPVGVLAATAMSNPAYKAVLDSSPNSNSSWELMKEVLLCKVNFQNTTNDRRVILYLNECHCGKRFCQENAACTVRNKLNKVSLKDTAVEFLVEYRKQPTISEIFGIDSCLHGHIHLNKTLLQDWNISMQDIHQKCEDVINSLGQKKKKKATDDFKRTSLSVSECCSFRDPCGSKGSDMPCLTFSYNATDPDLERTLDVLCNTVYPVLLEIVIKGDSRICSANIIWNSSDMTTWIRNRHASRRGEWVLDVTVEKSAVKQSGDAWRVVIDSCLSVLHLIDTKRSIPYSVKQVQELLGLSCAFEQAVQRLSASVRMVSKGVLKEHIILLANNMTCSGTMLGFNSGGYKALTRSLNIKAPFTEATLIAPRKCFEKAAEKCHTDSLSTVVGSCSWGKRVDVGTGSQFELLWNQKETGLDDKEETDVYSFLQMVISTTNADAFVSSPGFDVTEEEMAEWAESPERDSALGEPKFEDSADFQNLHDEGKPSGANWEKSSSWDNGCSGGSEWGVSKSTGGEANPESNWEKTTNVEKEDAWSSWNTRKDAQESSKSDSGGAWGIKTKDADADTTPNWETSPAPKDSIVPENNEPTSDVWGHKSVSDKSWDKKNWGTESAPAAWGSTDAAVWGSSDKKNSETESDAAAWGSRDKNNSDVGSGAGVLGPWNKKSSETESNGATWGSSDKTKSGAAAWNSWDKKNIETDSEPAAWGSQGKKNSETESGPAAWGAWDKKKSETEPGPAGWGMGDKKNSETELGPAAMGNWDKKKSDTKSGPAAWGSTDAAAWGSSDKNNSETESDAAAWGSRNKKTSEIESGAGAWGSWGQPSPTAEDKDTNEDDRNPWVSLKETKSREKDDKERSQWGNPAKKFPSSGGWSNGGGADWKGNRNHTPRPPRSEDNLAPMFTATRQRLDSFTSEEQELLSDVEPVMRTLRKIMHPSAYPDGDPISDDDKTFVLEKILNFHPQKETKLGSGVDFITVDKHTIFSDSRCFFVVSTDGAKQDFSYRKSLNNYLMKKYPDRAEEFIDKYFTKPRPSGNRDRNNQDATPPGEEQSQPPNQSIGNGGDDFQTQTQSQSPSQTRAQSPSQAQAQSPSQTQSQSQSQSQSQSQSQSQSQSQSQSQSQSQSQSQSPSQTQTQSPSQTQAQAQSPSSQSPSQTQT

SEQ ID NO: 55 - protein, 1947 aa, Arabidopsis lyrata
MEEESSSEILEGEIVGIKFALATHHEICIASISGSAINHPSQLTNSFLGLPLEFGKCESCGATEPDKCEGHFGYIQLPVPIYHPAHVNELKQMLSLLCLKCLKIKKAKSTSGGLADRLLGVCCEEASQISIRDRASDGASYLELKLPSRSRLQAGCWNFLERYGYRYGSDYTRPLLAREVKEILRRIPEETRKKLTAKGHIPQEGYILEYLPVPPNCLSVPDVSDGYSSMSVDPSRIELKDVLKKVIAIKSSRSGETNFESHKAEANDMFRVVDTYLQVRGTAKAARNIDMRYGVSKISDSSSSKAWTQKMRTLFIRKGSGFSSRSVITGDAYRHVNEVGIPIEIAQRITFEERVSVHNIGYLQKLVDDKLCLSYTQGSTTYSLRDGSKGHTVLKPGQVVHRRVIDGDVVFINRPPTTHKHSLQALRVYVHEDNTVKINPLMCSPLSADFDGDCVHLFYPQSLSAKAEVMELFSVEKQLLSSHTGQLILQMGCDSLLSLRVMLEGVFLDKATAQQLAMYGSLTLPPPALRKSSKSGPAWTVFQILQLAFPERLSCKGDRFMVDGSDLLKFDFGVDAMASIINEIVTSIFLEKGPKETLGFFDSLQPLLMESLFAEGFSVSLEDLSMSRADMDVIHNLIIREISPMVSRLRLSYRDELQLENSLHKVKEVAANFMLKSYSMRNLIDIKSNSAITKLVQQTGFLGLQLSDKKKFYTKTLVEDMALFCKRKYGRISSSGDFGIVKGCFFHGLDPYEEMAHSIAAREVIVRSSRGLAEPGTLFKNLMAVLRDIVITNDGTVRNTCSNSVVQFTYGVDSERGHQGLFEAGEPVGVLAATAMSNPAYKAVLDSTANSNSSWEQMKEVLLCKVNFQNTTNDRRVILYLNECHCGKRFCQENAAYTVRNKLKKVSLKDTAVEFLVEYRKQQTISEIFGIDSCLHGHIHLDKTLLQDWNISMQDILQKCEDVINSLGQKKKKKATDDFKRTSLSVSECCSFQDPCGRKDSDMPCLMFSYSATDPDLERTLDVLCNTIYPVLLETVIKGDPRICSANIIWNSSDMTTWIRNCHASRRGEWVLDVTVEKSAVKQSGDAWRVVIDACLSVLHLIDTKRSIPYSIKQVQELLGLSCAFEQAVQRLSASVRMVSKGVLKEHIILLANNMTCSGNMLGFNSGGYKALTRSLNIKAPFTEATLITPRRCFEKAAEKCHTDSLSTVVGSCSWGKRVDVGTGSQFELLWNQKETGLDDKEETDVYSFLQMVRSTTNADAYVSSPGFDVTEEEMAEWAESPERDSALGEPKFEDSAEFQNLHDEGKPSESNWEKSSSWDNGCSGGSEWGVSKNTGGEANPESNWEKTTNVEKEDAWSSWNTKKDAQESSKSDSGVAWGLKTKDDDADTTPNWETRPAQTDSIVPENNEPTSDVWGHKSGSDKSWDKKNGGTESAPAAWGSTDAAVWGSSDKKNSETESDAAAWGSRDKKNSEVGSGAGVLGPWNKKSSKTESDGATWGSSDKTKSGAAAWSSWDKKNMETDSEPAAWGSQSKNKPETESGPSTWGAWDTKKSETESGPAGWGIVDKKNSETESGPAAMGNWDKKKSNTESGPAAWGSTDAAVWGFSDKNNSETESDAAAWGSRDKKTSETESGAAAWGSWGQPTPTAANEDANEDDENPWVSLKETKSRDKDDKERIQWGNPAKKFPSSGGWSNGGGADWKGKRNHTPRPPRSEDNLAPMFTATRQRLDSFTSEEQELLSDVEPVMRTLRKIMHPSAYPDGDPISDDDKTFVLEKILNFHPQKETKLGSGVDFITVDKHTIFSDSRCFFVVSTDGAKQDFSYRKSLNNYLMMKYPDRAEEFIDKYFTKPRPSGNRDRNNQDATPPGEEQSQPPTQSIGNGGDDFNTQTQSPSQTQAQAQAQAQAQSPSQTQTQSPSPSQTQTQSPSQTQAQAQSPSQSPSQTQTYS

SEQ ID NO: 56 - protein, 1959 aa, Cucumis sativus
MEEAPSCSSILDAEIVGIRFSLANGQEICIAAISDCPITHASQLSNPFLGLPIEFGKCESCGTSEPGKCEGHFGYIELPIPIYHPNHITELKKMLSLLCLKCLKMKKTKNIGFAERLLSSCCEDASQVTIREAKKADGASYLQLKVPSRTSLQERFWDFLERYGFRYGDNFTRTLLPCEVKEMLKKIPNETRKKLAGRGYYPQDGYILQYLPVPPNCLSVPEISDGVTVMSSDPAVSMLKKILKQVEIIKGSRSGAPNFESHEVEANDLQLAVDQYLQVRGTVKASRGIDARFGVNKELNDPSTKAWLEKMRTLFIRKGSGFSSRSVITGDAYKLVNEIGVPFEVAQRITFEERVSVHNIRYLQELVDKKLCLTYRDGSSAYSLREGSMGHTYLKPGQIVHRRIMDGDIVFINRPPTTHKHSLQALRVYLHDDHVVKINPLICGPLSADFDGDCIHLFYPQSIAAKAEVLGLFSVEKQLLSSHSGNLNLQLANDSLLSLKMMFRKYFLGKAAAQQLAMFVSSYLPPPALLGVRSGSLHWTALQILQTVLPASFDCHGDSYLIKNSNFLKFDFDRDAMPSLINEILTSIFFQKGPEEVLKFFDSLQPLLMEHIFSEGFSVGLDDYSMPMAFLQALQKNIQVLSPLLYQLRSTFNELVELQLENHLRSVKVPFTNFILKLSSLGKLFDSKSESAINKVVQQIGFLGLQLSDKGRFYSKSLIEDVASLFHNRYSSDKIDYPSAEFGLVKGCFFHGLDPYEEMVHSISTREVMVRSSRGLTEPGTLFKNLMAILRDVVICYDGTVRNVCSNSIIQLEYGMKAGMMQPYSLFPPGEPVGVLAATAMSTPAYKAVLDSTPSSNSSWDMMKEILLCKVSFKNEPIDRRVILYLNNCACGRKYCNENAAYVVKSHLKKVTLKDAAMDFMIEYNRQPTPSGLGPGLVGHVHLNRMLLKELNIDMTEVLRRCQETMSSFKKKKKKIAHALRFSISEHCAFHQWNGEESIDMPCLIFWHQTRDVHLERTAHILADIVFPLLSETIIKGDPRIKSASVIWISPDSTSWQKNPSRWQDGELALDVCLEKSAVKQNGDAWRNVLDCCLPVLHLIDTRRSVPYAIKQVQELLGISCAFDQMIQRLSKSVSMVSKGVLGDHLILLANSMTCTGNMIGFNSGGYKALSRALNIQVPFTEATLFTPRKCFEKAAEKCHKDSLSSIVASCSWGKHVAVGTGSRFDILWDQKELGCKQDDVVDVYNFLHMVRSGKSEEPTSACLGEEIEDIMVEDEYGELTLSPEPFSTSEKPVFEDSAEFEHCLDNYPGESKWEKAPSLGAVSTGGGQWESNENGKATNSSDGNDWSGWGRKAEPDVTVTNAQENTSNSAWDTTSSWGNKATNSSNDNDWSNCSTKEVERDSFTSMEKTPKSGGWDSASTWGTKTKDDSFKRETAPKKSSQWSGLQKDKAETQDAFHKKAEMASKSGGWEDKAWSRGTSKTEDNWSSQVKDKAESFQVQVQEVSSKTNGWGSTGGWTKNSGGDHQSEAGWNDGQASMDREKVSDRWDRKATQKLESHQTSSWGSPTVGDSKDSFPSKAVDHSDSVVNHSWDRQKSPEASQGFGNDAWGQQKSRDVIKPSLANNESNLSGWGSQIESNEGSDHGFDQVTNEQKSSDTRGWDSQEKTDKPWDKQKSLEASQSWGSQNDSLGSWGQPQRASEECSRESQDDSSTQFSQLKPPETSLGWEQQKSPEVSHGWGSHKESSEQTSSHGWDKKNQGSKGWGGNAGEWKNRKNRPPKSPGMSNDDANLRALYTASGQRLDMFTSEEQDILADIEPIMQSIRKVMHQSGYNDGDPLSAEDQSFVLQSVFNFHPDKAAKMGAGIDHFMVSRHSSFQESRCFYVVTTDGHKEDFSYRKCLDNFIKGKYPDLAEMFVAKYFRKPRPNRNRDRNPASEENENKSIGGELTPIPEEAQNGSQQ

SEQ ID NO: 57 - protein, 1890 aa, Vitis vinifera
MEEDSSTILDGEISGIRFGLATRQEICIASVSDCPISHASQLTNPFLGLPLEFGKCESCGTAEPGQCEGHFGYIELPIPIYHPGHVSELKRMLSLLCLKCLKIRKSKVSLLINYFLDRMDLHCCALTTSNLDLAALILFSPQDIRCYHMFSFAIYITHPFSRIQTDKVTNNGITEQLLAPCCQDSPQVSVREFRPTEGACFLELKIPSRSRPKDGFWDFLARYGYRYGHNLSRILLPSEVMEILRRIPEDTRKKLVRKGYFPQDGYILQYLPVPPNCLSVPDISDGVSIMSSDLSVSMLKKVLKQIEVIKGSRSGEPNFESHKIEANNLQSSIEQYLEVRGTAKTSRSLDTRFGSSKEPNESSTKAWLEKMRTLFIRKGSGFSSRSVITGDAYKRVNEIGLPFEIAQRITFEERVNVHNMKHLQNLVDEKLCLTYRDGLSTYSLREGSKGHTFLRPGQVVHRRIMDGDIVFINRPPTTHKHSLQALSVYVHDDHTVKINPLICGPLSADFDGDCVHLFYPQSLGAKAEVLELFSVEKQLLSSHSGNLNLQLATDSLLSLKVLFERYFLNKAAAQQLVMFVSMSLPRPALLKSPCSGPCWTALQILQTALPSYFDCIGERHWISKSAILKVDYNRDVLQSLVNEIVTSIFSEKGPNEVLKFFDSLQPLLMENLFSEGFSVSLEDFSIPSEVTQNIQKNVEDISSLLYNLRSMYNELLQLQAENHLRLTKVPVANFILNSSALGNLIDSKSDSAINKVVQQIGFLGQQLSEKGKFYSRTLVEGMAYLFKSKYPFHGADYPSGEFGLIRSCFFHGLDPYEEMVHSISTREIIVRSSRGLSEPGTLFKNLMAILRDVVICYDGTVRNVCSNSIIQFEYGVKARTKPQHFFPAGEPVGVLAATAMSNPAYKAVLDSSPSSNSSWELMKEILLCQVNFKNDLIDRRVILYLNDCDCGRKYCRENAAYLVKNQLKKASLKDTAVEFMIEYVKQHAVSGSSEPGTGLVGHIHLNKLLLQDLNVSMQEVCQKCEETINSFRKKKNVGPFFKKIILSFRECCTFQHSCQSKGSDMPCLLFFWQGNRDDNLEQILHILAHKICPVLLQTIIKGDSRVCTVNIIWISPDTTTWIRNPCKSRKGELALDIVLEKAAVKQRGDAWRIVLDACLPVLHLIDTRRSIPYAIKQVQELLGISCAFDQAVQRLSKSVTMVAKGVLKEHLILLANSMTCAGNLIGFNSGGYKALSRALNLQVPFTEATLFTPRKCFEKASEKCHTDSLSSIVASCSWGKHVTVGTGSRFDVLWDTKEIGPAQDGGIDIYSFLHLVRSGSYGKEPDTACLGAEVEDLILEDENLELGMSPEHSSNFEKPVFEDSAEFQNTWENHVPGSGGDWAVNQNKETTASTLKPSAWSSWGTDKVTMKDTFSTREPDESSRSAGWDDKGTWGTDKAQNTAFRRTHEDSPRSSGRDETFRDGRPQFASSAWGKKIDEADKTGWNKNDGKPQMDKLRESYDWDCKVAQEKTTQSTYGGISSTTGDWKKNELQMEVVQHDESPVNEHSWDANLPEDPLAQATTSVGWDSSTGKDWTKRKLQSPSEQQRDPAIKSWSSSHNVMKEQSNQPASTHGWDSPGAKGWNDVEEQSQWNQRGSAVKNDQSESSHGWGPSNEQNQLPSSQGWGSPNAGAGHESETQSQWGQPSGKKSRPEGSRGWGSNNTEWKNKKNRPNKPQGPLNDDYSAGGIFTATRQRVDIFTSEEQDILLDVEPIMQSIRRIMHQAGYNDGDPLSADDQSYILDKVFNNHPDKAVKMGTGIDYVMVSRHSSFLESRCFYVVSTDGHKEDFSYRKCLENFIKEKYPDNAETFIGKYFRRPRAGGNRERSVIPEDGGNREQSVVPEETGSENRQ

SEQ ID NO: 58 - protein, 2010 aa, M. truncatula
MVYDGTLWCNLIHVYRFTKVFIMEDNATTSLLDGKVVGIRFSMATRHEISTASISDSQISHASQLANPFLGLPLEFGRCESCGTSEAGKCEGHFGYIELPVPIYHPSHVTELKKILSLVCLSCLRLKKTKVPSSSSGLAQRLLSPCCEDVNAAQVSIREVKTADGACYLALKVSKSKMHDGFWTFLEKYGYRYGGDHTRALLPCEAMEIIKRLPQETKKKLAGKGYFPQDGYILKYLPVPPNCLSVPVVSDGVSIMSSDPALTILRKLLRKVEVIRSSRSGEPNFESHQVEANDLQSVVDQYLQIRGTSKAARDIETHYGVNKELNDSSTKAWLEKMRTLFIRKGSGFSSRNVITGDGYKKINEVGIPLEVAQRITFEERVSIHNIHYLQKLVDENLCLTYKEGMSTYSLREGSKGHTYLKPGQIVHRRIMDGDTVFINRPPTTHKHSLQALVVYIHDDHTVKINPLICGPLGADFDGDCVHLFYPQSLAAKAEVLELFSVEKQLLSSHSGNLNLQLSADSLLSLKMLVKSCFLDRVAANQMAMFLLLPLPMPALLKATTGDSYWTSIQILQCALPFSFDCTGGRYLIRQREILEFDFTRDILPSIINEIAASIFFSKGPQEALNFFDVIQPFLMENIFAHGFSVGLQDFSISRAVKRVINRSIGKVSPLLRQLRGMYKELVAQQLEKVIQDIELPVINFALKSTKLGDLIDSKSKSAVDKVIQQIGFLGQQLFERGKFYSKGLVEDVASHFQLKCFYDKDDYPSAEFGLLKGCFFHGLDPYEELVHSIATREIIDRSSRGLSEPGTLFKNLMAILRDVVICYDGTVRNVCSNSIIQFEYGIQSGDAAQHLFPAGEPVGVLAATSMSNPAYKAVLDASPSSNSSWGFMKEILLCKVNFRNEPNDRRVILYLNDCDCGRNYCRENAAYLVQNQLRKVSLKDAALDFIVEYQQQRRRRDGTEDAGLVCHIRLKEVKLEELKINMTEVYQKCQEKLNSFSRKKKLSPFFKRTELIFSEFCSAPCVTFLWPDGVDLDQTTKVLADMICPVLLETIIQGDPRISSASIIWVNPGTNTWVRNPSKSSNGELALDVILEKEAVKQSGDAWRIVLDSCLPVLHLIDTRRSIPYAIKQIQELLGIACTFDQAIQRLAASVRMVAKGVLREHLILLASSMTCGGNLVGFNTGGYKTLARQLDIQVPFTDATLFTPRKCFERAAEKHHSDSLSSIVASCSWGKHVAVGTGSKFDIVWDPKEIKTNEIEGMNVYKFLNMVKGLANGEEETNACLGEDIDDLFDDENGDFDMSPQHASGFDAVFDETFELPNGSTSNGWDSNKDQIDQPNTNSNDWSGWGPNKSDLQVDVIQEDSSKSSAWGAATNQKSDQSASAWGKAVVQEDSSKSGAWGTATNQNSQQPSWGAATNQKSDQSASAWGKAVVQEDSSKSGAWGNAKSVVQEDSSKSGAPANTNHSSDQSCWGQITGGEERAQGESGGTKKWKADVSQEDSTNSGGWKAWGSSKPEVHEGESTKVQDSWNSQKWKAGEDVTQKDSQKSSAWGATKLKSNDIQEDSTNSGGWKAWGSSKPEVHEGESTKVQDSWNSQKWKAAEDVSQKDSQKSSAWGATKPKSNDNRSSWGQKKDEIHVMPEDSSRSNAWEQKPENVKDSWVAKVPVANSSWGKAKSPENRPWDSKNEPNNSFGKPNSQENEPWDSKNESDSSWGKPKSQESQPWDSKNESNSSWGKPKSQENHPWDSKNESNQTAGSRGWDSQVASANSESDKSFQWGKQGRDSFKKNRFEGSQSGGPNAGDWKNRSRPVRPPGQRFELYTPEEQDIMKDIEPIVQSIRRIMQLQGYNDGDPLANEDQKYVLENVFEHHPDKETKMGVGVDHVMVSKHSNFQDSRCLYVVLKDGKKEDFSYRKCLENLVRKKYPETAESFCGKYFRKPQPRVKRDQTPNPAGEQTAAPNPAGEQTAAPNPAGEQTATQNPPGEQTSTPNPAEEQTPTPAGDQTSTPVPMETN

SEQ ID NO: 59 - protein, 991 aa, Ricinus communis
MEDKENTQSSFLEGEVVGIKFGLATYKEISAASVSDCPISHSSQLTNPFLGLPLEFGKCESCGTSEPGKCEGHFGYIELPIPIYHPSHVSELKRMLSLLCLKCLKLKTNKIKSSGVAERLFSCCEEAAQISIKEVKTTDGAYILQLKLPSRMRLRDGFWNFLERYGFRYGDDITRTLLPCEVLEMLRRIPQDTRKKLAKKGYFPQDGYIMRYVPVPPNCLSVPDISDGVSVMSSDLSISMLKKVLKQVEIIKSSRSGEPNFESHEVEAVDLQSAVDQYLQVRGTAKSARDVGERFGVHKESNDSSTKAWLEKMRTLFIRKGSGFSSRSVITGDAYKCVNEIGIPSEIAQRITFEERVNAHNMQYLQELVDNKLCLTYRDGSSTYSLREGSKGHTFLRLGQIVHRRIMDGDMVFINRPPTTHKHSLQALSVYVHDGHTVKINPLICGPLSADFDGDCIHLFYPQSLAAKAEVLELFSVEKQLLSSHSGNLNLQLTSDSLLSLKTMFNTYFLDRAAAQQLAMFVSSSSLPQPALWKAHCSVPIWTALQILQTALPSQFDCSGERYLISNTDIVKVDFSRDVVQAVINDIVISMFFEKGPDAVFKFFNSLQPLLMESLFSEGFSVGLEDFYISRAAIGGTRRDFKVISSLLSQLRSTYNELMALQLENHIRRAKLPVADFIVRLSSIGDLIDYKSDSAMTKVVQQIGFLGLQISDRGKFYTKTLVEDMALHFESKYPSDIDYPSAKHGLIQSCFFHGLDPYEEMVHSISAREVMVRSTRGLSEPGTLFKNLMAILRDVVICYDGTVRNVCSNSIIQFEYGMKAGIKAQSLFPAGEPVGVLAATAMSNPAYKAVLDSTPSSNSSWELMKEILQCRVNFKNDITDRRVILYFNYCGCGKFYCQERLAYSVKNHLEKVILKDIALCFMCEYKSQPTIADAGLVGHVHLKKTKLQELNVSMEVIHRKCSETISSFGKKKKMGNLFKKIEFGMASNTFE

SEQ ID NO: 60 - protein, 2082 aa, Glycine max
MEDNPPSSVLDGTVVGIKFGMATRQEICTASISDSSISHASQLSNPFLGLPLEFGRCESCGTSEVGKCEGHFGYIELPIPIYHPSHISDLKRMLSMVCLNCLKLRKTKLPASSSGLAQRLISPCCQEDKAALVSIREVKTSDGACYLALKVSKSKMQNGFWSFLEKYGYRYGGDHTRALLPCEAMEIIKRIPIETKKKLAGKGYFPQDGYVLKYLPVPPNCLSVPEVSDGVSVMSSDPSITILRKLLRKVEIIKSSRSGEPNFESHHVEANDLQSVVDQYFQIRGTSKPARDIETHFGVNKELTASSTKAWLEKMRTLFIRKGSGFSSRNVITGDCYKRINEVGIPVEVAQRITFEERVNIHNIRYLQKLVDEHLCLTYKEGGSTYSLREGSKGHIYLKPGQIVHRRIMDGDIVFINRPPTTHKHSLQALYVYIHEDHTVKINPLICGPLGADFDGDCVHLFYPQSLAAKAEVVELFSVENQLLSSHSGNLNLQLSTDSLLSLKMLVKRCFFDRAAANQLAMFILLPLPRPALLKASSGDACWTSIQILQCALPLGFDCTGGRYLIRQSEILEFEFSRDVLPATVNEIAASVFFGKGPKEALNFFDVLQPFLMESLFAEGFSVSLEEFSISRAIKRIIRKSIGKVSSLLYQLRSLYNELVAQQLEKHIRDVELPIINFALKSTKLGDLIDSKSKSAIDKVVQQIGFLGQQLFDRGRFYSKGLVDDVASHFHAKCCYDGDGYPSAEYGLLKGCFFNGLDPYEEMVHSISTREIMVRSSRGLSEPGTLFKNLMAILRDVVICYDGTVRNICSNSIIQFEYGIQAGDKSEHLFPAGEPVGVLAATAMSNPAYKAVLDASPSSNSSWELMKEILLCKVNFRNELVDRRVILYLNDCDCGGSYCRENAAYSVKDQLRKVSLKDAAVEFIIEYQQQRTQKENSETDVGLVGHIYLDEMMLEELKISMAYVFDKCHERLKSFSQKKKVNQSLKNIELSFSESCSSSHPAAPCLTFWLKNYDSDLDNAVKVLAEKICPVLFKTIIQGDPRISSASIIWVSPDTNTWVRNPYKSSNGELALDIILEKEAVKQSGDAWRVVLDACLPVLHLIDTRRSIPYAIKQIQELLGISCTFDQAIQRVAASVKMVAKGVLREHLILLASSMTCGGNLVGFNIGGYKALSRQLNIQVPFTDATLFTPKKCFERAAEKCHTDSLSSIVASCSWGKHVAVGTGSKFDVVWDANEIKSNEIEGMDVYSFLHMVKSFTNGEEETDACLGEDIDDLLEEEYMDLGMSPQHNSGFEAVFEENPEVLNGSTSNGWDVSSNQGESKTNEWSGWASSNKAEIKDGRSEIAPKNSWGKTVNQEDSSKSNPWSTSTIADQTKTKSNEWSAWGSNKSEIPVGWASSNKTEIKDGRSETAQENSWGKTVNQEDSSKSNAWNTSTTVDHANTKSNEWSAWGSNQSEIPAGGSKAVQEDSWGSSKWKADVAQEDNSRLGAWDANAADQTKSSEWSGWGKKKDVTQEDNSRLGAWDANAADQTKSRDWSGWGKKKDITQEDNSRLGAWDANAADQTKSSEWSGWGKKKDVTQEDNSRLGAWDANTADQTKSNEWSGWGKKKEVTQEDNSRLGAWDANTADQTKSNEWSGWGKKKEVTQEDNSRFGAWDANAEDQTKSNEWSGWGKKKDVTQEDNSRLGAWDANAADQTKSNEWSDWGKKKEVTQEDNVQDSWGSGKRKDKVTQEDNSGSGGWGANRTDLAKSKSSEWSSWGKNKSEIPAGGSENVQNDSWGSGKLEDDTQKENSGSAWVRNKAETIDGGSEKPQEDAWNSGNWKAESKVGNASWGKPKSSESQAWDSHNQSNQNSSSQGWESHIASANSESEKGFQWGKQGRDSFKKNRFEGSQGRGSNAGDWKNRNRPPRAPGQRLDIYSSGEQDVLKDIEPIMQSIRRIMQQQGYNDGDPLAAEDQLFVLENVFEHHPDKETKMGTGIDYVMVNKHSSFQESRCFYVVCKDGESKDFSYRKCLANYISKKYPDLAESFLGKYFRKPRARGDQTATPGRDEAATPGEQTATPGRDEAATPAEQISTPTPMETNE

SEQ ID NO: 61 - protein, 1932 aa, Zea mays
MEEDHSVILISEGAIKSIKLSLSTGEEICTYSINECPVTHPSQLGNPFLGLPLEAGKCESCGASENDKCEGHFGYIELPVPIYHPCHVTELRQLLSLICLKCLRIKKGKVKQSNGKGNAAPTLCSYCRDIPALSLKEIKTTDGAIRLELRAPHNKHMTERSWNFLDKYGFHHGGCSHHRTLLPEEALNILKKVPDDTRRKLAARGYIVQTGYVMKYLPVPPNCLYIPEFTDGQSIMSYDISIALLKKVLQKIEQIKRSRSGSPNFESHDAESCDLQLAIGQYIRLRGTTRGPQDNTKRFTVGSADSAALSTKQWLEKMRTLFISKGSGFSSRSVLTGDPYIGLGVVGLPSEVAKRMTFEEQVTDININRLQDVVDKGLCLTYRDGQATYAITVGSKGYTTLKVGQTISRRIVDGDVVFLNRPPSTHKHSLQAFYAYVHDDHTVKINPLMCGPFSADFDGDCVHIYYPQSLAAKAEALELFSVERQLISSHSGKVNLQLGNDSLVAMKAMSHTTMLHKELANQLAMFVPFSLLAPAVIKPVPSWTISQIVQGAFPANLTCQGDTHLVRDSTIIRLDLGKESVQDSFPDLVSSILREKGPKEALQFLNVLEPLLMEFLLLDGLSISLRDFNVPKALLEEAQKDIRNQSLILEQSRCSTSQFVEFRVENNLKNVKQQISDSVGKFSDLGLLIDPKKEASMSKVVQQVGFVGLQLYREGKLYSRRLVEDCFTNFVNKHLAIGDEYPPEAYGLVQSSYFHGLNPYEELIHAISTREAMIRSSRGLSEPGTLFKNLMAILRDVVICYDGTVRNICSNSIIQLKYGEDDETDSSSVVPPGEPVGVLAATAISNPAYKAVLDSSQSNNASWESMKEILQTRTSYKNDVKDRKVVLFLNDCSCAKKFCKERAALAVQSCLKRVTLGDCATDICIEHQKQINLDGTSEAAPTLVGHIHLDKGHLERINISTQDILQKCQEVSGRFGKKKGHLCHIFKKITFATCDCSFTQMPIDGKLHKVPCVQFAFSDDIVLSESIERAVNVIADSVCSVLLDTIIKGDPRIQAAKVIWVESDAASWVKHTRKVSKGESALEIIVEKDDAVSNGDAWRTAIDACLPVLNLIDTRRSIPYGIQQVRELIGISCAFDQVVQRLSTTVKMVNKGVLKDHLILVANSMTCTGNLIGFNIAGYKATFRSLKVQVPFTESTLFTPMKCFEKAAEKCDSDSLGCVVSSSAWGKHAAVGTGSSFQILWNENQLKSNKEYGDGLYDFLALVRTDQEKTDYMFLDDVDYLVEENAADDMCLSPEPDGTLGKPTFEDNFEEQNIQKGSSWEIGITTNSSWEQNASVANDSGDWGGWSSGGGAAAKPADQDNSWEVHAKVQDNSTTDWGGWSVEKPTGEATVSGEPAETDTWADKGAKMESDAGDGNWEKSSTPEASKKNDSSENTWDKRKGDGGDGAWGNRSDDGHGNWEHPSNWNGQSLDVDQDTWGNARGKKKADGNYCQWEEQPSNYKQKKTNADHDSSYNNVMPSSEIAWNAGDGTGRPNAKSNAESSWGEEDKMESDDHPKVPKESDTWNTGRSNESPWDNTDALQDSWVKSAARNNNTQDGSWDKVVSMKDLDSLQDSWSKATIQTNDAQNDSWDNVAKNAPDSAAEDSWGAATPAETTDSGNKEWKSDGWGAKSGNWSSQRNNPGRPPRRPDERGPPPPRQRFELTVAEKNILLEVEPIKLRVRSIFREACDGVRLNPEDEKFILEKVLEHHPEKQSKVSGEIDYLTVNKHQTFQDTRCFFVVSTDGSQADFSYLKCLENFVRKSYTEDADTFCMKYLRPRRRQAPPADVGTASGAPDEVPPSTAAETEQGTPPAPQAEVPQETWGSPAVPLEGGTHIAGPDSTGDAVILGEQHDLTPASPAVAPQVASEPDTTDGTGLLGKAPQADWGPRFDAD

SEQ ID NO: 62 - protein, 1571 aa, Sorghum bicolor
MEDDDPAAAGLTVPEAFIRRVKLSVTSNQEIVSTSPLFPSQDPIPITHCSQLQDNPSLGLPLQDGSTCESCGATQLDKCDGHFGFIKLPEPIYHPSHIAELGKILNLVCLRCLRLKKPKKVTGKESRFTSCSYCQELSPLCVSQVKKSNGARSLELKLPLKQEVADGFWSFLDQFGFHTSGTSHRRPLHPKEVQDIMKKITEKTRARLAARGYNLQDGFVMDNMSIPPNCLQISNMLDENTEMCPPTSKGLLHKVLRTIEQIESLNISHPNIEARELGADDLQVAVADYMNMGGAAKVSQHVTFTRQPAPKQWHKKMKTLFLSKSSSYTCRAVITGDPYIGLDVVGVPDEIARRMSVQECVTNYNIARLQDMMNKGLCLTYTDLNTNTYDLDGKKGNKKCIMLRVGETVDRRVLDGDLVFLNKPPSTDMHSIQALYVHVHDDHTIKINPLICGPLEADFDGDCVHIFFPRSVLARVEAAELFAVEKQLLNSHNAKLNFQIKNDYLLALRIMCDRSYSKEKANQIAMFSSGMIPPCNPWTICDRWTIPQILQTTDALRIVPSHPNTVGASVTAIITSTLSEKGPREAIKLINLLQPLLMESLLMDGFSISLKDLDGQSAMQKANQSISLEIDKFSKSIVDFIANSSALGLLVDPKNDSALMNLVEQVGFLGYQLQSTDRLYSNNLVEDCYNFLEKRSGSTKCYDPPKGHDFVTSSFYNGLNPYEELLHSISVREKIERSSSKGLAEAGNLFKNMMAMLRDVTVCYDGTMRTSYNNSIVQFDSTNVSSSLTPGDSIGILAATVFANAAYKAVLVPNQKNMTSWDSMKEVLLTNACSKTGTIDQKAILYLNKCFCGLKFCSELAAHRVQSCLKRIKLEYCAIEVSIKYQQEATQAAQCLVGHIHLDKEQLNWMEITMGNILQTCQKNVNKHVMKNRQLMQILKTTEIISSEYCLCGQDIGDERALQVSCLQCFIHASTTTVQPESNVIQMMTNTIFPILLDTVIKGDPQVQEAKLIWVEPKLTRWVKNSSAEQKGELAVEITVEKIAAAENGGTWGVVMDACVPVMDLIDTTRSAPCNIQEVQKVFGISSVFDRVVQFLMFCPPLGSFFQHLSKAVGMVTKSVLMEHLITVASSMTCTGSLHGFNRSGSKATFQSLKVQAPFTEATLSRPMQCFRKSAEKVDSDQLDSVVSTCSWGNHAAIGTGSAFKIHWNDENQSASNEILREYNLYDFLEAVGRIGATEQKTDAPHSLCLYDVGQLPEDEVQEDEVVCFGGTSPISWTDKPKGDSLLHDFMGRAGMWSTVQKHQEMQNKTKWNSASTRGQNKRQFTGQVYARKQPKHSWSQAATHQNNKLSWCGENVAGAQDFANAESSKGGWNRKNSGFGRGGHRGGGRGMAFANAESSSSGGWNRKNSGFGRGGRRGGGRGMWKSEGSHRGGSNSTNWRAQNNNSARQCGISYSFTPVEQQIYTQVEPIIKNVKRIIRESRDGMKLSQDDEMFIMNKILMYHPEKEKKMAGQGNYIMVNKHQTFPSSRCLYVASSDGSSSDFSYKKCLENFIRIHYPHAAESFCRKYFK

SEQ ID NO: 63 - protein, 2017 aa, Oryza sativa
MEEDQSAIPVAEGAIKSIKLSLSTEDEIRTYSINDCPVTHPSQLGNPFLGLPLETGKCESCGASENGKCEGHFGYIELPVPIYHPCHVTELRQILNVVCLKCLRVKKGKVKQTEGKDNTSALSCYYCRDLPALSLKEIKTADGAFRLELKMPPRKFMTEGSWNFLDKYGFHHGGTSHCRTLLPEEALNILKKIPEETKRKLAARGYIAQSGYVMKYLPVPPNCLYIPEFTDGQSIMSYDISISLLKKVLQKIEQIKKSRAGSPNFESHEVESCDLQLSIAQYIHLRGTTRGPQDNTKRFAISTDPSALSTKQWLEKMRTLFISKGSGFSSRSVLTGDPYIGVDVIGLPSEVAKRITFEEQVTDINLNRLQEIVDKGLCLTYRDGQATYAITVGSKGHTTLKVGQTISRRIVDGDVVFLNRPPSTHKHSLQAFRVYVHEDHTVKINPLICAPFAADFDGDCVHIYYPQSLAAKAEALELFSVEKQLTSSHSGKVNLQLVSDSLLALKHMSSRTMLSKEAANQLAMLVTCSLPDPAVIKSKPYWTISQIVQGALPKALTSQGDKHVVRDSTIIKLDLDKESVQTSFSDLVYSTLSVKGPGEALQFLNVLQPLLMELILLDGFSVSLQDFNVPKVLLEEAQKNIEKQSLILEQSRFAENQVVEMRVDNNLKDIKQQISDFVVKRSHLGLLIDPKSDSSVSKVVQQLGFVGLQLYREGKFYSRRLVEDCYYTFVNKHPAVREEHSPEAYGLVRSSYFHGLNPYEELVHAISTREAIVRSSRGLTEPGTLFKNLMALLRDVVICYDGTVRNVCSKSIIQLNYTEDDALDFPSAIGPGEPVGVLAATAISNPAYKAVLDASQSNNTSWERMKEILQTTSRYKNDMKDRKVILFLNDCSCAKKFCKEKAAIAVQGCLRRITLEDCATDICIEDGNWAAPAGFQHPVPPPQCKILPVPIPIPAHGSVKFPPVPIPAPEHLKYNIHVVRYQKQIGLDGTSEAAPALVGHIHLDRAHLERINISTEDILQKCQEVSGKYGKKKGHLSNLFKNITFSTCDCLFTQKLVDGKLPKLPCLQFFVSDNMIVSESVERAVSVLADSLCGVLLNTIIKGDPRIQEAKIVWVGSDATSWVKNTQKASKGEPAVEIIVEEEEALHIGDAWRTTMDACIPVLNLIDIRRSIPYGIQQVRELLGISCAFDQVVQRLSTTVRMVAKDVLKDHLVLVANSMTFTGNLNGFNNAGYKATFRSLKVQVPFTESTLITPMKCFEKAAEKCHSDSLGCVVSSCSWGKHAASGTGSSFQILWNESQLKSNKEYGDGLYDYLALVRTDEEKARYTFFDDVDYLAEENEADVCLSPELDGTIGQPIFDDNLEEQDVQNNSSWDNGTTTNASWEQNGSAGNDSDKWGGWNDAAAGADTGVTKPANQGNSCWDVPATVEKSSSDWGGWGTEKAKEKEKISEEPAQHDAWSVQGPKRATDGGASWKKQSSTQNDGNSWKENKGRGSNGGSWEKDNAQKGSWGRGNDEAENNNDVQNKSWETVAADAHASTEKSWGNVTASPSDNAWSAAPVSQGNGSSDTKQSDSWDGWKSAGVDKAINKDKESLGNVPASPSFSAWNASPVSQGNERSDAKQSDSWDGWKSAGVDKAINKDKESLGNVPASPSFSAWNAAPVSQGNERLDAKQSDSWDGWKSAGVDDSVKDKESWGNVPASPSDSAWNAAPVSQGNESSDAKQSDSWDGWKSAGVDASTNKDKESWGNVPASPSDSAWNAAPVSQGDDVWNSAEANESRNKDWKSDGWGARGGNWRGQRNNPGRPPRKPDGRGLPRRPDERGPPRRHFDLTAEEEKILGEIEPTVLSIRKIFRESIDSIKLSPEDEKFIKENVLEHHPEKQSKVSGEIDHIMVDKHQVFQDSRCLFVVSSDGTRSDFSYLKCMENFVRKTYPEHGDSFCKKYFKRRRDQPPAADGGTAPGTPAGATQSTAVDTQEGTSQQTQPDIATAPAATQQETLQDTPAPPADDGLLGKGPSPSD

SEQ ID NO: 64 - protein, 1954 aa, Brachypodium distachyon
MEEDQSAVLVAEGAIKSIKLSLSTEDEILTYSINDCPVTHPSQLGNPFLGLPLETGKCESCGASENGKCEGHFGYIELPVPIYHPCHVSELRQLLSLVCLKCLRIKKGKAKQSNGKENVSVTACSYCRDVPALSLKEVKTADGAFRLELRAPPRRLMKDSSWNFLDKYGFHHGGASHFRTLLPEEALNILKKIPDDTRKKLAARGYIAQSGYVMKYLPVPPNCLYIPEFTDGQSIMSYDISISLLKKILHRIEQIKKSRAGTPNFESHEAESSDLQISIAQYIHLRGTTKGPQDTKRFTISTDSSHLSTKQWLEKMRTLFISKGSGFSSRSVLTGDPYIGVDVVGLPSEVAKRITFEEQVTDINIKRLQEVVDKGLCLTYRDGQTTYAITVGSKGYTTLKVGQTISRRIVDGDVVFLNRPPSTHKHSLQAFYVYIHDDHTVKINPLICSPLAADFDGDCVHIYYPQSLAAKAEALELFSVEKQLTNSHNGKVNLQLSNDSLLALKHMSSRTVLSKESANQLAMLLSFSLPDPAVVKLKPCWTITQIIQGALPAALTCEGGRFLVKDSTVIKLDLAKESVQASFSDLVSSILCVKGPGGALQFLNALQPLLMEYLLLDGFSVSLQDFNVPKVLLEEVHKSIQEQSLVLEQSRCSKSQFVEMRVDNNLKDVKQQISDFVVESSHLGLLIDPKSEPSMSKVVQQLGFVGLQLYREGKFYSSRLVEDCFSSFVDKHPPIVGNQHPPEAYGLVQNSYFHGLNPYEELVHSISTREAIVRSSRGLTEPGTLFKNLMAILRDVVICYDGTVRNICSNSIMQLKYNEDDATDIPSALTPGEPVGVLAATAISNPAYKAVLDASQSNNTSWASMKEILQTKVSYKNDTNDRKVILFLNDCSCPKKFCKEKAAIAVQNRLKRVTLEDCATDICIEYHKQILDGSSEATPALVGHIHLEKARLDMINVSTEDILQKCQEVSLKHGKKKGHLGHLFKKITFSTCDCSFTQKPMIDGKLPKVPCLQFSFSEDIPMLSESVERAVSVLANSLCDVLLDTIIKGDPRIQEAKIMWVGSDAQSWVKNTRKVSKGEPTVEIVVEKNEASKQGDAWRIAMDACIPVIDLIDTRRSIPYGIQQVRELLGISCSFDQIVQRLSTTMKTVAKGILKDHLILVANSMTCTGNLYGFNTGGYRATFRALKVQVPFTESTLFTPMKCFEKAAEKCHSDALGCVVSSCSWGKHAALGTGSSFQILWNENQLKSNKEYGDGLYDFLAMVRTDQEKARYTFLDDVDYLVEDNAMDDICLSPELNGTHGVPTFEDNFEHQDTQNGNSWENGTKANASWEQNASAGNDSDNWGGWSNAAAAADTGAAKPADQGNSSWDVPATAENDSTDWGGWGNEKAKDNRTVSTEPAELDTWSDRGAKKGTDGGGGSWGKQTNTCEDSGTNLERNSWAKRPSSPSLSTWAKKNSDGGDGTWDKQANSCKKNVEQDSWKNMPVSPARNAWNKKESSRGDATWEMRASTLEEKKTSESNEGSWEKSNAQKDSWGNTQHGSSDKMAVKDNDMQQDPWGHIATQNINAQDDLWGSVAAKAQTSTAENTDAQDDSWGAVAAKAQTSTAQESWGNVAASPSDNAWKAPPISQTSAAEHTDAHNDSWGIVAAKAQTSTAQQESWGNATASPSDNAWNAAPMDLDAKQPGSWDGWSSALAEDSNKADDSSNKNKGWKSDGWGAKGNRRDQRDNPSMPPMRPDERPPRPRFEVPAEAKKILREIEPIVSMVRKIFRESCDGVRLPLEDEKFIKESILEHHPEKERKVPGEIDHIMVNKHHIFQESRCFYVVLADGTHTDFSYNKCMDNYVRKTYTDAAEHADLVSQMYFKKRDRDRAAAVDGGSTPANASQSTQVMETSQDEAPQEAQPETCVATQEETRVSPQETPAATTQQEETENNPDSASEADYHSASEAGLPEGV

SEQ ID NO: 65 - protein, 1920 aa, Populus trichocarpa
MDENSQSSIFDGEITGIRFGLATQKEICTASISDCPISHSSQLTNPFLGLPLEFGKCESCGTSEPGKCEGHFGFIHLPIPIYHPSHISELKRMLSLICLKCLKLKRNKIQIKSNGVAERLLSCCEVSIKECAQISIREVKNTDGACFLELKLPSRSRLRDGCWNFLERYGFRYGDDFTRPLLPCEVMQILKRIPAETRKKLSGKGYFPQDGYILQQLPVPPNCLSVPVVSDGITVMSSDLSISMLKKVLKQAEVIRSSRSGAPNFDAHKDEATSLQSMVDQYLQVRGTTKTSRDVDTRYGVKKESSESTTKAWLEKMRTLFIRKGSGFSSRSVITGDAYTLVNQVGIPYEIAQRITFEERVSVHNMRYLQELVDNKLCLTYKDGSSTYSLREGSKGHTFLRPGQVVHRRIMDGDIVFINRPPTTHKHSLQALSVYVHDDHAVKINPLICGPLSADFDGDCVHLFYPQSLAAKAEVLELFSVEKQLLSSHSGNLNLQLTTDSLLSLKMMFKACFLGKSAAQQLAMFISPYLPQPALLKVNCFFPHWTAHQILQMALPACFNCSGERFLIINSNFLKVDFNRDVVASVINEILISMFFEKGSGAVLKFFNSLQPMLMENLFSEGFSVSLEDFSISRAVKQRIPESFKAISPLLCNLRSTFNELVELQVENHIRDVKQPVREFILTSSALGYLIDSKSDAAVTKVVQQIGFLGLQVSDRGKLYSKTLVEDLASHFLSKYPANLFDYPSAQYGLIQNSFFHGLDAYEEMAHSISTREVIVRSSRGLSEPGTLFKNLMAILRDVVICYDGTVRNVSSNSIIQFEYGVKVGTESQSLFPAGEPVGVLAATAMSNPAYKAVLDSTPSSNCSWDMMKEILLCKVGFKNDLADRRVILYLNDCGCGRNYCQERAAYLVKNHLEKVSLKDIAKCFMIEYKSQQIPESFGSDAGLVGHVHLDKRKLQDLNITAQVILEKCQETVNTFRKKKKVGNLFKKTILLVSESCSFQQCIDESPCLMFFWQGADDVHLERTSNILADMICPVLLETIIKGDHRISCANIIWATPETNTWIRNPSRTQKGELALDIVLEKSVVKKSGDAWRIVLDSCLPVLHLINTTRSIPYAIKQVQELLGVSCAFDTAVQRLSKSVTMVAKGVLKEHLILLGNSMTCAGSLIGFYTGGYKTLSRSLDIQVPFTEATLFTPRKCFEKAAEKCHTDSLSSIVASCAWGKHVTVGTGSHFDVLWDTKEACLNPEGSMDVYSFLNMVRSTAGGEESVTACLGAEVDDLMLEDEDWNLSPEHNSSSDKPTFEDSAEFQDFLGNQPAESNWEKISSLKDRSRSSGNWDVDKNDGAVKEKPWSLGMNTAEANDVASSGWDTAAARTTNNSWNSENNVAQSNSFSGWATKKPEPHNGFATKVQEEPTTSNDWDAGAAWGRKDRDNKFAETNASKSWWGKVTDGDESGQNKSKNKRPEDQDVGTHGWDDKMSQDQSISGWASKTTQEATTESLGWDSKGNSNPGDAACGWKAASTWGAENTDGDKLWGKEVSSNQADTASGWGKPKSPEISLGWGSTKESVKSDRGWGVSSSGGGRDKKTENQSLAGQGKESGGWGNKVTSNQADTASGWGKPKSSENSQGWGLSKESGKEVHEWGVPNSAGGNGSETNNNNENQSLVEQGKESGWDNKASSNQEGTASGWGKPKSPALSEGWGSPREPVKAVHGWGVPNSGGGNGSGRDQQWGQQSREFKKDRFEGSRGWGSNNGDWKNKRNRPSKPHEDLNASGIFTTTRQRLDVFTSQEQDILSDIEPLMLSIRRIMHQTGYNDGDPLSADDQSYVLDNVFHYHPDKAVKMGAGIDHVTVSRHSNFQESRCFYIVSTDGCKQDFSYRKCLENFIKGKYPDLADEFIAKYFARRGNRQRTPAPEGTEEEKQAL

SEQ ID NO: 66 - protein, 1869 aa, B. Napus
MEEASSSDILEAEIVGISFALATHRQIRLASISDAGINHASQLSNAFLGLPLEFGKCEACGATEPDKCEGHFGYIHLPVPIYHPAHVSELKQMLSLLCLKCLKIKKIKSTSSGLAERLLGVCCEEASNITIKDKSSDGASYLQLKLPSRTRLQEGFWNFLERYGYRYGSDHTRPLLAREVKEILRRIPEETRKKLTAKGHIPQEGYILEYLPVPPNCLSVPEVSDGSNSMSVDPSRIELKDVLRKVVAINNSRSGETNFESHRAEANEMFRVVDTYLQVRGTAKPTRNIDMRFGVSKISDSSSSKAWTEKMRTLFIRKGSGFSSRSVITGDAFRNVNEVGIPMEIAHRITFEERVSVHNIGYLQELVDNKMCLSYTQGSTTYSLRDGSKGHTVLKPGQIVHRRVMDGDVVFINRPPTTHKHSLQALRVYVHEDNTVKINPLMCGPLSADFDGDCVHLFYPQSLTAKAEVLELFSVDKQLRSSHTGQLILQLGLDSLLSLRVMMEQVFLDKASAQQLAMYGSRSLPSPAVVKSSKSSPAWTFFQILQLAFPERLSCRGDGFIVGGSDLLSFDFGVDALASIINGIVTGIMVEKGPKEALAFFDSLQPLLMEHLDPQGFSLSLEDLSMSREDMGVIHNLIVREISPMVSRLRLSYEDELQLENSIQKVKEVAANFMLKSYSMRNLIDIKSNSAINKLVQQIGFLGLQLSDKKKLYTKTLVEDMAQFYKKKYVSTSSSGDFGIVKGCFFHGLDPYEEMAHSVAAREVIVRSSRGLAEPGTLFKNLMAVLRDIVITNDGTVRNTCSNSIVQFKYELSSDNENQGLFEAGDPVGVLAATAMSNPAYKAVLDFSPNSNSSWELMKEVLLCKVNFQNTTNDRRVILYLNECRCGKKYCQENSAYTVRNKLKKVSLKDTAVEFLVEYRKQQAISEIFGMDICLHGHIHLNKTLLEGWNISMQDILQRCEDAINSLVQKKKKKAEDFKKMNLSVSECCSFRGPGSSKDSDMPCLMFSSYNATDPDLERTLDVLCNTIYPVLLETVIKGDPRIASANIIWNSPETTTWIRSLHASRRGEWVLDVTVEKSDVKQSGDAWRVVIDSCLSVLHLIDTKRSIPYSIKQVQELLGLSCAFEQAVQRLSASVRKVSKGVLKEHIILVANNMTCSGDMLGFNSGGYKALTRSLNIKAPFTEATLIAPRKCFEKAAEKCHKDSLSTVVGSCSWGKRVDVGTGSQFELLWNKKETGLENDDETDVFSFLQMVRSTKTADAYVSSPGFDVTEEEMAEWAESPERDSALGEPKFDDSAEFQNLLDEGKASESKWDNGSLWENGCSSGSEWGVSKNAGGEENTQSGWGKAANVENEDASSGWNSKKDAQEATNTDSWGAWGSKTKDDAENATPNWGTKPAQNDSVVIENGEPSSDVWGPKAVSDKPWGKKNSETEPAPAAWGKTNSESGATWGSRDKSKFETESGGAAWGSQAKNNSETEPGSGAAAWGTWDKKKSETESGGGGAAWGSQAKNNSETESGSGAAAWGKKKPETESGGGAAWGSQAKKNSESQLGAANWGSKDTNNSENGSDSAAWGKKKNSEAEPTSVAWGSWGQPSPPASDKDAQEDDGNPWVSLKATSSGDKEGNETSQWGVPNKRYPSAGSQSQGGGGGADWKRNRPPRTPGSESILGPMFTATRQRVDMFTSEEQELLSDVDPVMRRLRKIMHQSGYTDGEPISDEDKTYVLEQILNYHPDKDAKLGPGLDFITVDKHTTFTESRCFFVVSTDGTKQDFSYRKCINNYLVEKHPNLAEEFIAKYFRKRDNENRDKNSQEATPPGEQEPQTQPIDNGSQDSQPQPIGNEGGVTQPQSQIEDIQPIGNGGEDSQTEPQA

SEQ ID NO: 67-79 - skipped (13 entries)

SEQ ID NO: 80 - protein, 954 aa, A. thaliana
MDQLASLAESVAMEEDSEKQSIKGESSLEPDSTPSSPKITARWNPSEACRPLVDDAPIFYPTNEDFDDPLGYIEKLRSKAESYGICRIVPPVAWRPPCPLKEKKIWENSKFPTRIQFIDLLQNREPIKKSTKTKKRKRRRISKIGYTRRKRDSGCDTASSGSSDSEGKFGFQTGPDFTLEEFQKYDEYFKECYFQSEDHPGSKASENKKFKPKVKDLEGEYWRIVEQATDEVEVYYGADLETKKFGSGFPKYKPGYPISEADQYSQCGWNLNNLSRLPGSVLAFESCDISGVIVPWLYVGMCFSTFCWHVEDHHLYSMNYLHTGDPKVWYGIPGNHAESFENVMKKRLPDLFEEQPDLLHQLVTQLSPRILKEEGVPVYRAVQRSGEFILTFPKAYHSGFNCGFNCAEAVNVAPVDWLVHGQNAVEGYSKQRRKSSLSHDKLLLGAAMEATYCLWELSLSKKKTPVIARWKRVCSEDGLLTKAVKKRVQMEEERLNHLQDGFSLRKMEGDFDNKRERECFLCFYDLHMSASSCKCSPNRFACLIHAKDLCSCESKDRYILIRHTLDELWALVRALEGDLDAIDLWASKCRDQYPSQHPRAREYAYLKSAPCIKSRGSSKVQQREQNNLQLVSERLQSDLTSNKEVQLKQDGDSDVNRHGHESERNHVHGITDKSAVTDVKLGVGGKFDEKKISVESQNPHSVSDVGCSELAKKVDGCLGGKDQNAATNRLSLSVELLSSGSLVVKKLWCSKQAIYPKGFKSRVKFLSVLDPTNLTNYISEVLDAGLLGPLFRVSVEDYPTENFSNVSAEKCWQMVTQRLKLEIIKKCDQPVSSLTSLQPLESINGLEMFGFLSPHVIKVVEALDPKHQLEEYWNQKAVKLFGAEPIKEGEKDDTEKGGASDPSLDRDTRLLRGLLKKATPEELVMMHGLLCGETRNTELKEELSTLVDKMEISP

SEQ ID NO: 81 - protein, 948 aa, A. lyrata
MDQLASLAESVAMEEDSEKQSIKRESSLEPDSSPSSPKITARWNPSEACRPSVDDAPIFYPTNEDFDDPLGYIDKLRSKAESYGICRIVPPVAWRPPCPLKEKKIWENSKFPTRIQLIDLLQNREPIKKSTKTKKRKRRRISKIGYTRRRRDSGCDTASSSDSEGKFGFQTGPDFTLEEFQKYDEYFKECYFQAEDHPGSRASENKKFKPKVKDIEGEYWRIVEQATDEVEVYYGADLETKKFGSGFPKYTPGYPKSEADQYSECGWNLNNLSRLPGSVLAFESCDISGVIVPWLYVGMCFSTFCWHVEDHHLYSLNYLHTGDPKVWYGIPGNHAASFEDVMKKRLPDLFEEQPDLLHQLVTQLSPRILKEEGVPVYRAVQRSGEFILTFPKAYHSGFNCGFNCAEAVNVAPVDWLVHGQNAVEGYSKQRRKTSLSHDKLLLGAAMEATYCLWELSLSKKKNPVIARWKRVCSEDGLLTKAVKKRVQMEEERLHLLQDGFSLRKMEGDFDIKRERECFLCFYDLHMSASSCKCSPNRFACLTHAKDLCSCESKERFILIRHTLDELWALVRALEGDLDAIDLWASKCRDQYPSQHPRAREYSYLKTTSCLKSRSSSKVQQREQNNLQLVSERLQSDLTTNKEVQLKQDGDQDVNHHGHESERNHVHGITDKSAVTDVKLGEGVKFDEKKISVESQNPHSVSDVGCSELAKKVEGKDQDASTNRLSLSVELLNSGSLVVKKLWCSKQAIYPKGFKSRVKFLSVLDPTKLTNYISEVLDAGLLGPLFRVSVEDNPTENFSNVSAEKCWQMVTQRLKLEIIKKCDQPVSSLTSLQPLESINGLEMFGFLSPHVIKVVEALDPKHQLEEYWNQKAVKLFGAEPPKEGEKDDTEKGGASDPSLDRDTRLLRGLLKKATPEELVMMHGLLCGETRNTELKEELSTLVDKMEKSP

SEQ ID NO: 82 - protein, 1069 aa, C. Sativus
MTLQPMDRNKLEADSETKGDQSSKSSHKSNQTVERSGSPQHQKISARWDPNEACRPLVDEAPVFYPTVEEFEDTLGYIAKIRPQAESYGICRIVPPSSWNPPCVLKEKSKWENATFSTRIQQVDLLQNREPMKKKSRGRKRKRRRQSKAGTSARSTNLGVEATVTSESDEKFGFNSGSDFTLKDFQAYADHFRESYFGITKAQEDINFDIESSKRWEPSVEDIEGEYWRIVEKSNDEVEVYYGADIESATFCSGFPKASSLVTEGNLDPYVKSGWNLNNFPRLQGSVLCFEESDISGVLVPWLYVGMCFSSFCWHVEDHHLYSLNYMHWGDPKVWYGVPGSHASSLEAAMKKHLPDLFAEQPDLLHELVTQLSPSVLKSEGVPVYRVVQNSREFVLTFPRAYHAGFNCGFNCAEAVNVAPVDWLVHGQNAVELYSAQRHRTSLSHDKLLFGSAREATQALWEILVLEKKTPNNLNWKSVCGIDGDLTKVIKTRVKMEEERMNCLPTNMKLQKMESEIDCKSERECYACFYDLYLSSTSCKCSPDRFSCLKHASNFCSCQVDDRSVLFRYSINELHTLVEALEGGLDAIKEWASRYCKMEKDNESVAKVELDSGLNDKPSWSPQITDKLKRSDVPCSSSSHASSEVVQSESHRGSLSLNNSNLSSDSQNDNVNSEMLINKGKKVEQEGCIDLNVDIISEGNANCGPHISDTKTIIDLEETYPLVFEQKYICKAAHESELMDLDTDHVTTLPAHDYSSSVKDGVRICGSNASKLFGVDLSQSQSQLHSAFPYNNCSKVETSEHLDKRIPSWSSSHLKTFPFVEPLNIGTIMFGKPWHCEKAIFPKGFRSRVKFLSVLDPTSIVTYTSEVLDAGLLGPLFKVTLEESPGENFTNVSATKCWDMVVQRINREIERHNLRSGGRLPGQLLKEVDGLEMFGFLSPHVIQAIEALDPTHQCMEYWNHRKQQAIPANSGDNTFCESSALGLNFCWGETSATTFDINREEDETVTPTIGMERHHQNEVQVRSVLKGLLNKANPEELSVLQTIFCTDSQTTELRAEFASLIKEKQDKCR

SEQ ID NO: 83 - protein, 951 aa, V. vinfera
MTFHPTTSITNFIPFSIWLIGSIYFFNIKSGLSQLCDLVLLRIVFGIFWKDWVCHQKGPFFQRVVIDKLGFDTDCFWSMEQSSLEPEFQIKEDHSSKHALKNDSNIEYSGSPQNQKISARWNPTEACRPLIEEAPVFYPTVEEFQDTLNYIASIRPKAEPYGICRIVPPPSWVPPCPLREESIWKHLKFPTRMQQVDLLQNREPMRKKNRGRKRKRRRYSRMGTTRRHSRSEVSEANIVSDSDEKFGFHSGSDFTLEEFQKHADSFKEFYFGIKDAKDNLNSDGVECNKRWEPSVEDIEGEYWRIVEKPTDEVEVYYGADLETEAFVSGFPKASSLISENDSDQYVASGWNLNNFPRLPGSVLCFEQNDISGVLVPWLYVGMCFSSFCWHVEDHHLYSLNYLHWGDSKVWYGVPGSHASALENAMRKHLPDLFEEQPYLLNELVTQLSPSVLKSENVPVYRAIQNSGEFILTFPRAYHSGFNCGFNCAEAVNVAPVDWLSHGQSAVELYSEQCRKTSISHDKLLLASAQKAVQALRDPSVLGKEDQVNLSWKSVCGKDGTLTKAVKTRVQMEEERLDRLPIGWRLQKMERDFDLKNERECFSCFYDLHLSAASCECSPDQFACLKHASLICSCEPNRKFVLLRYTMDDLKTLVESLEGGLDAIEVWASEDLGLVSADKDACLTKGYESKVGQGFCIDLNLDTMSDEHVSGLQQVSYSCDSKATGNMNFCVEPMHFGTVLFGKPWCSKQAIFPKGFTSRVKFFSVCDPTQMCYYISEVLDAGLLGPLFKVTSEGCPSETFANVSPEKCWEMVLQKLQQEIIRHSSLGKQLLPSLECLQGVNGLEMFGFLSPPIIQVIEALDPNHQCLEYWNQKSRAKLFGFDLTKQDPDNSSIGRGDHSVGEDIKTTLQGFFKKANREELIMMYKVFCSEYTSAEWGVAFTTLTEEIRKTCK

SEQ ID NO: 84 - protein, 1003 aa, M. Truncatula
MKQMELDAIEDSPLRHKPKKDNALESPESLRSKKISARWDPSEACRPIIDEAPVFHPTIEEFEDTLSYIAKIRPLAEPYGICRIVPPACWVPPCLLKEKDIWENAEFSTRIQQIDLLQNREPMKKKSRGRKRKRRRNSKSGTCRRASKSASEANNASEADEKYGFQAGSDFTFKDFQQYASHFKECYFGLKDANEDGKVNDSNHQNRREPSEEEIEGEYWRIVEQPTDEVEVYYGADLETGVFGSGFSKASSIPKGYPDQYAISGWNLNNFPRLPGSVLSFEGSDISGVLVPWLYVGMCFSSFCWHVEDHHLYSLNYLHFGDSKIWYGVPGSHASALENAMKKHLPDLFEEVPNLLNDLVTQLSPSILKDEGVPVYRTVQNSGEFVITFPRGYHSGFNCGFNCAEAVNVAPVDWLTHGLNAVELYSLQRRKTSLSHDKLLFGSSLEAIRALAELTLHGKESSKNLKWRSYCGKDGVLTMAFKARIKMEEERLNCLPTHFKSLKMGNDFDLHTERECFSCFYDLYLSAVGCECSPDKYSCLTHASSFCMCEMDQRFVLLRYNMNELNKLLEALEGDSLALKLWESKNFGMVSAEANEVCMNKPEVDGDNGHEETGCAGTRDRSNSHATSEPMQCESHLVTLSAPNESIDSDNDNMIVVDKDKVDIADSHNKGDSVEEKACCSKIKKEQDNMEIVVDLSPSSSVVKTEVSSCSRNVHNPCTSDSGKYEGQQQMDSDSRKKPKIVVEKVIDTTSASISLTQESFLMQILSTSVKPISLGSVVHGKLWCNKHAIYPKGFKSRVNFFSIIDPTRICSYVSEVINAGLLGPLFKVTMEECPSVTFTETSADKCWESVLKRLHDKITEQRSLGELELPSLELLKSINGFRMFGFPLPSIVQAIEAQDPGHQCAEYWNHKGFPTSPGSVIDNCKVLCCSSSPTKVFGINLTDQAKDNIGGSSSSLEEMKSILQKASPEELSSLRKFLISDAQCSEWRITLTSLIDEIQKAL

SEQ ID NO: 85 - protein, 935 aa, R. Communis
MAYHYLNNVHMLVEGITNYDVGHTFSEFHHVIARWNPIEACRPSIDEAPVFYPTVEEFEDTLGYISNIRAKAEPFGICRIVPPLSWRPPCRLKEKDIWENAKFSTRIQQVDLLQNREPMRKKFRSRKRKRRRHSKMGASRRRATSCSEANAASEADEKFGFQSGSDFTLEEFQKYADHFKACYFGVMDSMEDVKPGIEHQKLEPSVEEIEGEYWRIIEQPTDEVEVYYGADLETGTFGSGFPKASSMAIEGDSDQYFDSGWNLNNLPRLPGSVLCFEESDISGVLVPWLYVGMCLSSFCWYRIMKSFGLFYFYFVLYLAVVYHWWFHLLGQVTQLSPSVLKAEGVPVYRVVQHSGEFVLTFPRAYHSGFNCGFNCAEAVNVAPVDWLAHGQYAVELYSKQHRKTSISHDKLLLGSAQEAVQALWELLHLGKETPGNLRWRNVCGKDGLLTQAVKTRVQMEEERLQNLPTHLKLQKMEKDFDLGNERECFMCFYDLHLSAASCKCCPEQFACLKHAKDFCSCENDESYVLVHYTVDELNRLVEALEGSLDAIKVWISKEFRLVSEADNGAHECKVEQKCDLFQNNYCEQSESPSCSPRTEELLGTNISCSNSQVSSEVTQSNSHDHIFNNDAMILKNKPVVKKESCIDLNLDFMSVDHENESFDASNSSGNKVRSDVETNKSRVNLSYNFGSFVEPINFGSIMLGKLWCSKQVIFPKGFRSRVQFLSVLDPRKSCSYISEIVDAGLLGPLFKVSLEEYPSETFTNVSAEKCWEMVLQRLNEEIMRRNTLGERGLPPVLPLQSINGLQMFGFSTSPILQAIEALDSNHQSVDYWKNRLVNLSTTSEVKQSLIGLGCNPVDPEDKIGNNVMTKYPDNLNAQGHSDEEEEVQHIVRGLFKKANSEELKIMRKVLCSDTQSAERRAALTTLMEEIQKTSR

SEQ ID NO: 86 - protein, 1049 aa, G. max
MEQLKLAADSEAKEDKSLGHKPKNNNALESSDSLRNKKISARWDPVEASRPIIEEAPVFYPTIEEFDDTLSYIAKIRPLAEPHGICRIVPPACWAPPCPLKEKDLWENTEFPTRIQQIDLLQNREPMRKKSSGRKRKRRKHSKTGTCRRKPANAASEAKNASESEEKFGFQSGSDFTLKDFQLYADFFKECYFGLRDTNGDRIVSDNNHQKIWEPSEEEIEGEYWRIIEQPTDEVEVYYGADLETGALGSGFPKASSLTKSESDQYAQSGWNLNNFARLPGSVLSYEGSDISGVLVPWLYVGMCFSSFCWHVEDHHLYSLNYLHWGDPKVWYGVPGSHAAALEKVMRKHLPDLFEEQPNLLNDLVTQFSPSILKSEGVPVYRTVQHSGEFVITFPRAYHAGFNCGFNCAEAVNVAPIDWLMHGQSAVELYRLQCRKTSLSHDKLLFGSALESVRALAELALGKETPKNLKWGSVCGKDGDLTKAVRARIKMEEERLDCLPTHLKLLKMNSNFDLYKERECFSCFYDLHLSAVGCECSPDRYSCLKHANLFCSCEMEKRFVLLRYTISELNKLLEALEGDSHAIEVWANKNFGMVSANANEVCIDKPDLEKDMYRTKNCEEMESSTGCVRTKDRSNLNAPSSPNSHITTEIVQFESHPVTCAAYDSIDSRHDNNNDKNLITDSKDKVDQAGSLDLNLDVISGENENHLLHIADNHHNKGVSVEEKVCCSEAKKEEDIMELCGEGNLSNLFSVLKTDFSSCSRGVRNYCTFDGGKIEKDLQVDSDSGKQHSNLFEREVIVTTHTSTSLMDESCLVQMFGTSVKLVSLGSVVYGKLWCSKHTLYPKGFKTQVNFFSIVDPKRICSYISEVIDAGFLGPLFKVTMEECPSEAFTDTSADNCWESVLKRLHHEIMRQKSLGELELPPFELLKSINGHRMFGFKLPSIIQAIEAQDPSHLCVEYWNHKVAPSGSVVDNFPFGSSSSLGNINTKIFGIDLIKQEKDNILEEMKSILQGASPDELRTMHKLIISDAQCCEWRVALIALMDGIRNACQ

SEQ ID NO: 87 - protein, 1239 aa, Z. mays
MLSAMMGIEGIAATVTEDPEPSIPPGFGPFAASASWGIQNDVKPADDHSSSVLALQSIDDDVEILEYLSSSVDHQSDTGCCISGSNTCRKSLRNRPPIDYSRFDQIADEDSDAEVADKGVNAVKHRQQFPKGVLRGCPECANCQKVIARWNPSGARRPVLDEAPVYYPTEEEFQDTLKYIEIIRPTAEPYGICRIVPPASWKPPCLLKEKNIWECSKFSTRVQKVDKLQNRKSPKKSRRGGMMKKRRKISETEENNHHQIGMQQNQERFGFEPGPEFTLQMFQKYADDFSDQYFMKDKCRDSPPSVEDIEGEYWRIVERPTEEIEVIYGADLETGTFGSGFPKLCPEMKSDVEDKYAQSGWNLNNLPRLQGSVLSFEGGDISGVLVPWLYVGMCFSSFCWHVEDHHLYSLNYMHWGAPKMWYGVPGKDAVNLEAAMRKHLPELFEEQPDLLHNLVTQFSPSLLKSEGVPVYRCVQHEGEFVLTFPRAYHAGFNCGFNCAEAVNVAPIDWLPVGQNAVDLYREQARKITISHDKLLLGAAREAIRAQWDILFLKRNSSVNLRWKSICGPDSTICKSLKARIEMELVQRQNISSPCQSRKMDSEFDSTDRECALCYYDLHLSASGCPCSPEKYACLVHAKQLCSCDWDKRFFLFRYDVNELNILADALGGKLSAIHRWGVSDLGLSLSSCVKREKVQDSKTVRRLTDGPRRSYMSQASTVSLIPSSVSTEQKKNEDKTLDLGCPGMNLPKISPEANNLRPSTEQIKSENLSQLKEPCVKNELSCPTSNGTSQEHKGGIGGHKLAAASMMVLSGQSFPANAGESVRNAHVLAVFKEGRDCTSSLTLREYHNRPVSMIDNGANMKLDLENIDNSHMLMSSPDFNATVCHSYKDQTFLTLETNTSVMTEKDSSQARNASQQFVSTALRTQNVSQEPLCTAIAPKQLIDPQVQKKSYGVFGSGSAHLGHLTVGNQQLNERWHQRQSDSLSSVEVRARGHSAMIVQPALENHSRNGVAQKGPRIANVVHRFKCSVEPIEIGAVLSGKLWSSSQAIFPKGFKSRVKYFSVVDPVQMTYYISEILDAGQQGPLFMVTVENCPGEIFINISPTKCWNMVRERLNMEIRRQLNMGRANLPTLQPPGSVDGHEMFGLLTPAIVQAIEARDRDYICTEYWRSRPHATIENRDNQNMSPQDPPLVALRGLFQRANCDELRALRSLLMSNRILGDNSRQQACQILDEEIAKQWH

SEQ ID NO: 88 - protein, 1221 aa, S. Bicolor
MMGTECIVATLGGDPEPSIPPGFGPFVALALQGIRDNVKSGDAHSSSAQAVQCKEKDVDIVEHGSANSRSGTPASTSGTHSCRRSLRNRPPIDYSQFDLIWDDESDVESAEKGVGSVRHRRQLPKGVLRGCAECADCQKVIARWNPSGARRPVLEEAPVFYPSEEEFKDTLKYIESICPRAEPYGICRIVPPPSWKPPCLLKEKNIWECSKFSTRVQKVDKLQNRKSSKKSRRGGMMKKRRKLLELEDNNNLNHSQTGMQQNQERFGFEPGPEFTLQTFKKYADDFNEQYFKKEVSGDSVPSVEDIEGEYWRIVEKPTEEIEVVYGADLETGTFGSGFPKFSPEVKSDVEHKYAESGWNLNNLPRLQGSVLSFEGGDISGVLVPWVYVGMCFSSFCWHVEDHHLYSLNYMHWGAPKMWYGVPGKDAVNLEAAMRKHLPDLFEEQPDLLHNLVTQFSPSLLKSEGVPVYRCVQHEGEFVLTFPRAYHAGFNCGFNCAEAVNVAPIDWLPIGQDAVELYRKQARKITVSHDKLLLGAAREAIRAQWDILFLKRNTADNLRWKSMCGLDSTICKSLKARINLELVQRQNICSPSQSRKMDAEFDSTERECALCYYDLHLSASGCPCCPEKYTCLAHAKQLCSCDWDKRFFLFRYDVNELNLLADALGGKLSAIHRWGVSHLGLSLSSCVKREKDQDSKTLHRVTEGPRRSYMSQASTVSLAPSVVCKEQNNNGNKMLNTSSLETDTSGPFSEPIKSGNVSLQKETQMRNEVLCTLNNSVSPEGHKGSLNFPVPSGQSFSSNFATRSLSTSGESMKTAYGLAVFEGSRESSRSGNCISSVGVHHNIPPIMVDQGNNMNPSMESSNNSHRLMASNTNATQCHSYKDQMHVTPETRACASSSQPFVRTVLRAQSVSKEASAGVFGSKPLINSSLVKNTYGGSSSCGAHLGLPNFGNQQPSDGCLQRKSESLCGSEARGQPVLVVQPALENRNRNGGAHKGPQIANVMHRFKSLVEPLEIGVVLSGRLWSSSQAIFPKGFRSRVKYFSIVDPTQMAYYISEILDAGPQGPLFMVTLENCLGELFINVSPTKCWSMVRERLNMEIRRRLSMGRTNLPALQPPGSVDGFEMFGLLSPAIVQAIEARDRDHICTEYWRSRSHIVTEDRDSRQMGPLQAQGPLHALRELFQRANRNELLALRSLLVSNNNLDDFSRQQAAQILDEEMAKQWR

SEQ ID NO: 89 - protein, 954 aa, O. Sativa
MVSSRDPGEEASAPPPRPPRRGEKRRMRGRTPSPEPASAPQTNGKWHPHESYRPEIDDAPVFTPTEEEFKDPIRYITSIRPQAEKYGICRIVPPSSWRPPCSLKEKNFWECTEFNTRVQQVDKLQNREPTKKKSQPRVQKKRKRRKRLRFGMTHRRPSANTSEDCADADEKFGFQSGSDFTLDEFQKYADEFKQQYFGIKGSDEIPLSEIKKKKKNWQPSVDEIEGEYWRIVVCPTDEVEVDYGADLDTSMFSSGFSKLSSDSNRRDPYGLSCWNLNNLPRIPGSVLSFETEDISGVVVPWLYVGMCFSSFCWHVEDHFLYSMNYMHFGEPKVWYGVPGADAVKLEEAMRKNLPRLFEEQPDLLHELVTQLSPSVLKSEGVPVYRVVQNPGEFVLTLPRAYHSGFNCGFNCAEAVNVAPVDWLPHGQCAVELYREQRRKTSISHDKLLLKTANEAVRQLWMNLSDCKSEQGVYRWQDTCGKDGMLTSAIKTRVKMEKAARGGNMALRYKKMDGDYDSADRECFSCFYDLHLSAVSCQCSPNRFACLNHANILCSCEMDRKTALLRYTIEELHTLVAALEGDPTAVYQWGQNDLGLVCPSGSTQYKKMDLGENTEFPDSATNVNHGCSLGSQDQYHYDPAKPAGYQQEKGIQIASEKHDKNKMVVNLESPATASNPSRSKSDCSGSLSLNHSSELPSSRIQTGNSTLASITTEKLFGVDIKSNLAQSSDGQVSQLAKPSSSQTDEVSKPAIAKYTVELLDSGTMMIGKKWCNQQAIFPKGFKSRVTFHSVLDPTRTCCYISEVLDAGLLGPLFRVTVEGLPEVSFTHTSPMQCWDSVRDRVNEEIAKQISFGKSGLPDFLSCNSLNGLEMFGFLSSPIIKEIEALDPCHQCLDYWLSRVSSVGTELPSESVMAAMVNDSTNPPIKLLGIEINRRESEQSSSFNNSCVRRSHLAGC

SEQ ID NO: 90 - protein, 1038 aa, B. Distachyon
MVFSSASPMEEKSGGLGRPPRREKRRMCNPAASSEPSSMAMTLQDLCSSRSCEEDGGGTATTHGKWNPYESHRPEIDDAPVFTPTEEEFEDVIGYITSICPLAEKYGICRIVPPPSWRPLCPLKEKSFWHCTEFNTRVQEVDKLQNREPTKKRTQPRVQKKRKRRKRLRFGMSRRRPSANASESADSGEKFGFQSGSDFTLEEFQKYADEFKQQYFGMKGSDEISLSEIKNRKEIWRPSVEEIEGEYWRIVVCPDDEVEVDYGADLDTATFSSGFNKLSLSDANKQDPYCLSCWNLNNLRRQHGSVLSFETEDISGVVVPWLYVGMCFSSFCWHVEDHFLYSLNYMHFGEQKVWYGVRGDDAVKLEEAMKRNLPRLFEDQPDLLHELVTQLSPSVLKSEGIPVYRVVQNPGEFVLTLPRAYHSGFNCGFNCAEAVNVAPVDWLPHGQCAVELYREQRRKTSISHDKLLLKTAQRALRQLWINLGNCRCGQTEYVWLDTCGKNGMLTSAVKTRVKMEGAARETNAVLQYKKMDQDYDSTDRECFSCFYDLHLSAVSCKCSPDRFACLNHANLLCSCEIGRIFLLYRYSMEELNALVAALEGDSAALYQWIQFDQDFVSQSGSMQQNNMDFSKSKELCESATDLNIGCGFDDCHDLDKTGQQKEKKVQNKCADVNMENKSSPRIKNVLVRSSDTSNAACFSISSCTASEKHDKDKIAIDSESIVTRINPPVSNSQFSQSSKCLSELSCPKGNSTPSSKTTKKLFGVDIGCNMTKTSDAQVSQLVKPSTSQPDEVSRPTILWSTVEPLEYGTVMVGKNWCNHQAIFPKGFRSRVTFHSVLDPTKTCGYISEVLDAGLFGPLFKVTVEDLPEISFTHTSPMECWNSVRDRVNEEIEKQHVVGKSGGCAILSTNSVNGLEMFGFSFPPIIQAIEALDPYHRFLEYWLSKHMPPVKELPSGSVMAEAVNGMNNSPIRLPGVDITSNESEHSSFRHKSCAEEVKLDRLLKKAKLPEEPELIDTNKVFSSREHSSSNWSGSRHSAG

SEQ ID NO: 91 - protein, 1047 aa, P. trichocarpa
MEQFKSPAYSHVKEDHSIKQSWRSDNTPKGPRSPQNQKVTARWDPVEACRPLIDDAPVFYPTVEEFEDTLGYISKIRAKAELYGICRIVPPPSWSPPCRLKEKDIWEHAKFSTRIQYVELLQNREPMRKKSKSRKRKRSSRMGTTRRRKRRLTNSSSEGNVASETDETFGFHSGSDFTLEEFEKEAAYFKECYFGTKDLMDDGNETQKWEPSVEDIEGEYWRIVEKPTDEVKVLYGADLETATFGSGFPKASALMTEGDSDQYVVSGWNLNNLPRLPGSVLCFEGCDISGVLVPWLYVGMCFSSFCWHVEDHHLYSLNYLHWGDPKIWYGVPESHASNLEDAMRKHLPDLFEEQPDLLHGLVTQLSPSVLKAEGVPVYRVVQHSGEFVLTFPRAYHSGFNCGFNCAEAVNVAPVDWLAHGQHAVELYSEQRRKTSISHDKLLMGAAQEANRALRELLLLGKETPENLRWMSVCGKDGVLTAAVKTRVKMEEERIKSLPTNLKLQKMEKDFDLQKERECFSCFYDLHLSSASCKCSPERFACLQHASHFCSCEIDHRYVLLRYTMDELNTLVDGLEGESYGLKDCPDEQGLVSLGDNGTRVPELELKGEEFQTNYSKRKESPHCSKKTEEKLSTKGSCSFNSNTSSEVIQSESYHNSFPVMKNKDKVKQEGCIDLNIDVMSIDQESKHLLESDGCDNKAISYVKETHGSPCMQETPGSSDAAKEQDREQAVGDCEAKLQELSNKNDPSYPMFTQDTCASRNKLFGVDLSRSHSVRPAKSFKTEMNKGGLDVRPATNQSIPVKKLNPCVEPINVGSVMFGKLWCCKQAIFPKGFKSWVKFFNVHDPIKKCSYISEVRDAGPLGPLFKVSLEKFPGETLAADVSIQKCWEMVVQRLNDEIGRRNSLGERNLPPSQSINGIEMFGFLSPPIVQAIEALDPDHRCVEYWNHRLVNLRNTREAKQPPFGSSCCLTKMKEKIDINLLTQEPGSLFIGGHRSVDEDVQHVLRGLFKKASQEELKTMHRILHSDAQSAERREAFTTLMEEIQKTSR

SEQ ID NO: 92 - protein, 964 aa, B. Napus
MESSASPAAESKAMEVDSEKQSIKRDSSSPGPDSTPPSPKKVASPAAESLAMEVDSEKQSVKGDSSPEPDSEKQEIKGDRSPEPDSAPPSPKVSPKWNPLEACRPSVDDAPIFYPTNEDFEDPLAYIEKLRSRAELFGICRIVPPVAWKPPCPLKEKEIWEKSKFPTRIQLIDLLQNREPIQKSPKSKKRKRGRVSKVGYSRRRRDSGSDDDDSTEDAEGKFGFQTGPDFTLEEFQKYDEEFKESYFQLENGSKASENKKFKPKVKDIEGEYWRIVEQATDEVEVYYGADLETKKFGSGFPKYSPDSRKSLEEHQYSTSGWNLNNLSRLPGSVLSFEKCDISGVIVPWLYVGMCFSTFCWHVEDHHLYSLNYLHTGDPKVWYGIPGSHAASFENAMKKLLPDLFEEQPDLLHQLVTQLSPSILKEQGIPVYRAVQRSGEFILTFPKAYHSGFNCGFNCAEAVNVAPVDWLVHGQDAVEGYSKQRRKSSLSHDKLLLGAAMEAIYYLWELAVTRKKTPVIARWKRVCSEDGLLTKAVKKRVEMEAERLNQLGDSYRVVKMEGDFDIKRERECFLCFYDLHLSASSCKCSPNRFACLTHARDLCSCESKDRFVLLRHTLDELRSLVRALEGYPDAIEAWARISREQNPSRQQSAKEALDFKSSTSCSKSRGSSKTQQQNNLQLGSGGLQSDKEVQLKQDGDQDVHGITTKSDEKKVAVKSQNPHSVSDVGCSEPDAATNRLSHSVELLKSGSLVVKKQWCSKQAIYSKGFKSRVKFISVLDPTKLTNYISEVLDAGLAGPLFRVSLEECPSENFSNVSAEKCWQMVIQRLKLEIIKRCDQPASSLTALQALESIGLEMFGFLSPHVIQALEALDPKHQLEEYWNQKTAKVFGVELTKEGEKDNDDKEKGGASDPSMDRDTRLLRGLLKKATPEELAMMHGLLCGETRNTELQEELSSLVDKMEKSP

SEQ ID NO: 93-131 - skipped (39 entries)

SEQ ID NO: 132 - protein, 1133 aa, A. thaliana
MVSETTTNRSTVKISNVPQTIVADELLRFLELHLGEDTVFALEIPTTRDNWKPRDFARVQFTTLEVKSRAQLLSSQSKLLFKTHNLRLSEAYDDIIPRPVDPRKRLDDIVLTVGFPESDEKRFCALEKWDGVRCWILTEKRRVEFWVWESGDCYKIEVRFEDIIETLSCCVNGDASEIDAFLLKLKYGPKVFKRVTVHIATKFKSDRYRFCKEDFDFMWIRTTDFSGSKSIGTSTCFCLEVHNGSTMLDIFSGLPYYREDTLSLTYVDGKTFASAAQIVPLLNAAILGLEFPYEILFQLNALVHAQKISLFAASDMELIKILRGMSLETALVILKKLHQQSSICYDPVFFVKTQMQSVVKKMKHSPASAYKRLTEQNIMSCQRAYVTPSKIYLLGPELETANYVVKNFAEHVSDFMRVTFVEEDWSKLPANALSVNSKEGYFVKPSRTNIYNRVLSILGEGITVGPKRFEFLAFSASQLRGNSVWMFASNEKVKAEDIREWMGCFRKIRSISKCAARMGQLFSASRQTLIVRAQDVEQIPDIEVTTDGADYCFSDGIGKISLAFAKQVAQKCGLSHVPSAFQIRYGGYKGVIAVDRSSFRKLSLRDSMLKFDSNNRMLNVTRWTESMPCFLNREIICLLSTLGIEDAMFEAMQAVHLSMLGNMLEDRDAALNVLQKLSGENSKNLLVKMLLQGYAPSSEPYLSMMLRVHHESQLSELKSRCRILVPKGRILIGCMDEMGILEYGQVYVRVTLTKAELKSRDQSYFRKIDEETSVVIGKVVVTKNPCLHPGDIRVLDAIYEVHFEEKGYLDCIIFPQKGERPHPNECSGGDLDGDQFFVSWDEKIIPSEMDPPMDYAGSRPRLMDHDVTLEEIHKFFVDYMISDTLGVISTAHLVHADRDPEKARSQKCLELANLHSRAVDFAKTGAPAEMPYALKPREFPDFLERFEKPTYISESVFGKLYRAVKSSLAQRKPEAESEDTVAYDVTLEEAGFESFIETAKAHRDMYGEKLTSLMIYYGAANEEEILTGILKTKEMYLARDNRRYGDMKDRITLSVKDLHKEAMGWFEKSCEDEQQKKKLASAWYYVTYNPNHRDEKLTFLSFPWIVGDVLLDIKAENAQRQSVEEKTSGLVSI

SEQ ID NO: 133 - protein, 1134 aa, A. lyrata
MVSETTTNRSTLKISNVPQTIVADELLRFLELNLGEDTVFALEILTTRDNWKPRDFARVQFTTLEVKSRAQLLSSQSKLLFKTHNLRLSEAYDDIIPRPVDPRRRLDDIVLTVGFPESDEKRFCALEKWDGVRCWILEEKRRLEFWVWENGECYKIEVRFEDIVETLCCCVNGDASETNAFLLKLKYGPKVFKRVSGPHIATKFKSDRYQFCKEDFDFMWIRTTDFSGLKSIGTSTCFCLEVHNGSTMLDVFSGLPYYREETLSLTFVDGKNFASVSQIVPLLNAAILGLEFPYEILFQLNALVHAQKISLFAASNMELINIFRGLSLETTLVILKKLHQQSSICYDPLFFVKTQMQSVVKKMKHSPASAYKRLTEQNIMSCQRAYVTPSKIYLLGPELETANYVVKNFAEHVSDFMRVTFVEEDWSKLPANALTVNSKEGYFVKPFRTNIYNRVLSILGEGITVGPKRFEFLAFSASQLRGNSVWMFASNEKIKAEDIREWMGCFRKIRSISKCAARMGQLFSASRQTLNVRAQDVEQIPDIEVTTDGADYCFSDGIGKISLAFAKQVAQKCGLSHVPSAFQIRYGGYKGVIAVDRSSFRKMSLRDSMLKFDSNNRMLNVTRWTESMPCFLNREIICLLSTLGIEDAVFEAMQAVHLSMLGNMLEDRDAALNVLQKLSGENSKNLLVKMLLQGYAPSSEPYLSMMLRVHHESQLSELKSRCRILVPKGRILIGCMDEMGILEYGQVFVRVTLTKAELKSREQSYFHKIDEETSVVIGKVVVTKNPCLHPGDIRVLDAIYEVNFEEKGFLDCIIFPQKGERPHPNECSGGDLDGDQFFVSWDEKLIPSQMDPPMDYAGSRPRIMDHDVTLEEIHKFFVDYMISDTLGVISTAHLVHADRDPEKARSQKCLELANLHSRAVDFAKTGAPAEMPYALKPREFPDFLERFEKPTYISESVFGKLYRAVRSSLAQRKPEAESDGTLTYDATLEEAGFESFIETAKAHRDMYAEKLTSLMIYYGAVNEEEILTGILKTKEMYLARDNRRYGDMKDRITLSVKDLHKEAMGWFDKSCEDEQQKKKLASAWYYVTYNPSHRDEKLTFLSFPWIVGDVLLDIKAENAQRQSGEKPTSGIVSI

SEQ ID NO: 134 - protein, 1117 aa, C. Sativus
MAQPERSTLRVSNVPESAIAQDLLNFLNSKLGPDSVFAIEIFTERKNWKSRGSGRVQFTTLEAKAKAMSLSVQNSLVFGTQNLRFSLINDDIVVRPVHATNRTENGVLHVGFMLKEERMSVLESWEGVKAWIMPERRRIEFWIWHEQECYKLEVMFEEILETTGHCLGEEKLNALLLKLKYAPRIYKKISGSNMASRFSSTRYRLCIEDYDYLWVRTTEFSPMRSVGQSTSFCWEVEEDLQASDIFSCFPFYKETQKDIVLEDGEEFCSTSEIVPLIKSGLGSNLAYEVEYQLNSLVHMQKISLSAANQDLIDFLCTLDIDTALNVLQRLHQLKFVCYDPLSFLKTQLHVYKRNCKSLPPSSQKRLSNNVMNCYRVLVTPSRIYCLGPELETSNYVVKNFSSYASDFMRVTFVEEDWSKLPAGAVTTSIQRGILSKPYRTEIYHRIMTVLRDGIVIGAKRFEFLAFSASQLRSNSVWMFASSDNLKAEEIRQWMGCFEKIRSISKCAARMGQLFSSSTQTLVVPTRDVEIIPDIEVNTDGIDYCFSDGIGKISLSFARQVADKCGVNHIPSAFQIRYGGYKGVIAVDRNSFRKLSLRDSMLKFESKNKMLNVTKCCDSMPCYLNREIATLLSTLGVKDESFEALQQEQLHLLKRMLTDKDVALNVLENFHGADSNNILVQMLNHGYEPNIEPYLSMMLQAHYWNLFSDLRSRCRIFVPKGRILLGCLDETGILNYGQVYACITLTKSELQSRNQNYFHTIDETKSILLGKVVVTKNPCLHPGDVRVLEAIFHVELEEKGLVDCLIFPQKGARPHTNECSGGDLDGDLYFISWDENLIPPKTEAPMDYTGRRPRIMDHDVKLEEIQKFFVDYMINDTLGAISTAHLVHADREPKKALSAKCLELAALHSMAVDFAKTGAPAEMPRVLKPREFPDFMERFDKPMYISSNVLGKLYRAAVKSIEQERSRLVWSEEAARAIYDYDLEVDGFEAFLEIAETYKEMYIEKMSILMNYYGAEYEDEILMGDLRSRASYLQRDNRKYGDMKDRILLSVKNLRKEVKEWFENSCDPLNRRMMASAWYHVTYHPSYFKEDMFYFSFPWAVSDVLLNIKAMNSKRHQA

SEQ ID NO: 135 - protein, 1127 aa, V. Vinifera
MAVGERPTVKVSNIPKTAIAKELWSFLESKLGPNTIYALEIATEHKNWKSRGFGRVQFETLQAKRAADLLSLQGDLVFRGSSLSISATFDDIIVRPVEPRNQVDSGVLHVGFLVEDDCMLVLESWEGVKTLVMPERNRVEFWVDKDGERYKLEVPFDDVLESSACCLGGGKVNALLLKLKYAPKIFQKFAGPNIASKFSADRYHISKEDAEFLWLRTTDFSSIKSLGQSTSFCWEIKEGFPALDIFASFPYYKDLTELTLEQGEGFCSDSGLVPLVKCESGPKLAYEILFQLNSLVHAQKISLAAVDTDLIEILSNLPVDTAIMILQKLHKRKSTRYDPISFIKAQAHIINMNIKNLPPSSHSRLTNNNVMSCHRVLVTPSKIYCLGPELESSNYVVKHYAAYASDFVRVSFVEEDWSKLPSNALSMSIRKAFFADPFRTEIYHRILSILREGIVIGAKRFQFLAFSASQLRSNSVWMFASNDKVRVDDIREWMGCFKKIRSVSKCAARMGQLFSSSVQTLPVPVQDVEVIPDIEVTSDGFGYCFSDGIGKISLSFAKQVAQKCGLHQTPSAFQIRYGGYKGVIAVDRNSFRKLSLRSSMLKFESQNRMLNVTKWSESTPCYLNREIVSLLSTLGVEDENFEALLNEQMHLLDKMLTNRQAALDVLESMGGIDNKNILAKMLLQGYEPNVEPYLSMMLQAYRESQLSDIRTRCRIFVPKARVLIGCLDETGILNYGQVYVRVTMTKAEHKCRNQSFFQKVDDTTSVVIGKVIVTKNPCLHPGDIRVLDAVYEVELEEKGLVDCILFPQKGERPHPNECSGGDLDGDQFFICWDEGLIPSQTEAPMDYTSRRPRIMDHDVTLEEIQKFFVDYMINDTLGVISTAHLVHADREPEKARSKKCLELATLHSMAVDFAKTGAPAEMPRVLKPKEFPDFMERVDKPMYISNGALGKLYRATIASRVNEKSSFVWSGTIPGAAYDHDLEVDGFETFLEIAKLHKEMYAEKMATLMNFYGAESEDEMLTGNLRNKLMYLQRDNRRFTEMKDRILISVKSLQKEAKEWLYGSCKPHQHQKMASAWYHVTYHSTFSSQTPNFLSFPWIVGEVLLVIKSANSRKAETSKDNCIQQNM

SEQ ID NO: 136 - protein, 1123 aa, M. Truncatula
MVIPSSETPTVRVTNIPHTATANDLLRYLETTVGRSSVFALEIFSDYTNWKSRGVGRVQFETLEAKSKALTLAENKKLLLSSHFLCLDASSDDIIPRPALPRNRINNGALYAGFPIGPDCMSVLQSWEGVRGWVMPERQRLDFWVTHGDQCFKLEIPFENILECDGYCSDEGSKPNALLLKLRYGPRIYQKMAGPNVAAKFKDDRYRFCKENFEFMWVRTTDFSTLKSIGHSTSFFWEIVEESFDSDVFRSFPLYRENLKDLSLEDGEKFCSPTETVPLVKCRLDSKLPYESLFQLNSLVHTQKISLASVNDELIDLLASLDAETKAVIFQKLHKMNSTCYEPLKYVRTQLHVLSIKKKSVLPSQQKRLVDNNIMSCHRALITPSKIYCLGPELETSNHVVKHFAAYASDFMRITFVEEDWSKLPNNAISITLKKGMFSRPLRTEIYKRVLNILRDGILIGSKRFEFLAFSASQLRSNSVWLFASNDKVKAADIREWMGSFNNIRSVSKCAARMGQLFSSSRQTFEMAPQDVDLIPDIEITSDGIDYCFSDGIGKISQSFARQLAEKLKLDENRIPSAFQIRYGGYKGVIAVDRHSFKKLSLRKSMLKFESKNRMLCVTKWSESMPCFLNREIISLLSTLGIKDEALLALQEDQLQLLGKMLTDKEAALDVLESLNGADSNSILVKMLHRFYEPNSEPYLSMMLKAHYTYQLSDLKSRCRIFVPKGRVLIGCLDETGLLNYGQVFVRITVAKTKEKFGDENLRNVDGDDSTRIIVGKVVVTKNPCLHPGDIRVLDAVYSEELEEKGLRDCLVFPQKGHRPHPNECSGGDLDGDLFFISWDKDLIPAQTENPMDYTGRRPRIMDHKVTLEEIHQFFVDYMINDTLGAISTAHLVHADREHDKAKSRKCLELAELHSMAVDFAKTGAPAEMPRSLKPREFPDFMERFEKPMYISKGVLGKLYRATIDSNLQVRFDMVMSEKFAKEAYDHQLEVDGFEVFLETALSHRDMYAQKMISLMSFYGATTEDEMLTGNLQNRASYLQRDNRRYGDMKDRILISVKDLQLEAKEWFESDCQPHEYQLMASAWYHVTYHPKYYIESSTFLSFPWIVGDILLHIKSANAPSVP

SEQ ID NO: 137 - protein, 983 aa, R. Communis
MEISFEDVLETVGCRLGGDTLNAILLKLKYGARIYKKISGPDIASKFSADRYHMCKEDFDFIWVRTTDFSSVKSVGQSTSFCWEIEEGLEASDIFKSFPYYTEAREEVILEDGEEWGSASEIVPLVKCGSDSKLPYEILFQLNSLVHTQKISLAAVDTNLITTLGSLTIDTATMILQKLHKLAVTCYDPLAFIKKQLHVPGRNLKRPFFSSSKNLVNHNIMSCHRALITPSKIYCLGPELESSNYVVKNFASYASDFMRVTFVEEDWSKLPANAISMSIQRGIFAKPFRTGIYHRILSILRDGIVIGAKKFEFLAFSASQLRSNSVWMFASNDKKKAEEIREWMGCFNKIHSISKCAARMGQLFSSSKQTFIVSPQDMEIIPDIEVTSDGINYCFSDGIGKISLSFARQVAQKCGLNRTPSAFQIRYGGYKGVIAVDRNSFRKLSLRDSMCKFESENRMLNVTKWSESMPCYLNREIITLLTTLGVKDEIFEGLQQQQLQLLNRMLTNRESALNVLENLAWANCKNILIKMLVQGYEPNVEPYLSMMLQAYHENLLVELRSRCRIFVPKGRILIGCLDETRILDYGQVYVRITMTKAELQDADQASFHRVDETTAVVTGKVIVTKNPCLHPGDIRVLEAVYEVELEEKGLVDCILFPQKGERPHPNECSGGDLDGDQFFISWDKGLIPGETESPMDYQGRRPRKMDHDVTLEEIQKFFIDYMINDTLGAISTAHLVHADREPDKARSSKCLQLAELHSMAVDFAKTGAPAEMPKALKPKEFPDFMERIDKKMYISGGVLGKLYRGTLDSTRQQRSKFVWTENIAEATYDHDLEVKGFEEFVEIAISHKDMYVEKLSGLMDYYEAKKEDEILTGNLQNKAMYLQRDNRRYGDTKDRILISVKSLQKEAKEWFESCCQAKEKQRLASAWYHVTYHPSYFQEGITCLSFPWIVADILLNIKSANSKNLKTSSVPCIEDATKEAEDN

SEQ ID NO: 138 - protein, 1121 aa, G. max
MGTTTTTTLSNTVRVSNIPQSATAKDLLDFLESTVGPSTVFALEIFSDNPNWKSRGFGRVQFETLDARSRALSLSQLNHLLFHRHFLRLSETDADIIFRPQHRLHNGVLYAGFVLSDHRMSVLESWEGVAGWVLPLRKRLDFWVWHNGDCYRLEFLFEDILESHGYCLGEDAKLNALLLKMKFGPRIYKKKTGADVAAKFRGDRYRFCKEDFEFLWVRTTDFSPLKSIGHSTSFCWEIVEEHLALDVFKSFPLYKENLRDLALEDGEEFCSSTEAVPLVKRASQSKLPYEALFQLNSLVHTQKISLASVDDELIDLLAGLDEETRAVIFLKLHKMSFTCYEPLKFVKTQLHVLSNKKKGLPQSSQKRLTDSNIMSCHRALITPTKIYCLGPELETSNHVVKHFASHASDFMRITFVEENWNKLPTNAVSTGVQKGLFSKPLKTEIYKRILTILRDGIVIGSKRFEFLAFSASQLRSNSVWLFASNDNLKAADIREWMGCFNNIRSVSKCAARMGQLFSSSMQTFEVVSQDVEIIPDVEVISDGVSYCFSDGIGKISQSFARQVAQKLKLDHTPSAFQIRYGGFKGVIAVDRRSFRKLSLRSSMLKFESKNSMLCVTKWSESMPCFLNREIISLLSTLGVKDEVLLAMQHDQLDLLGRMLTDSKAALEVLESLNGADSKSILVKMLHEFNEPNSEPYLSMMLKAYYAYQLSDLKSRCRIFVPKGRVLVGCLDETGLLNYGQVFVRITVTKTREKFGDENLRKVDGDDNTCIIVGKVVVTKNPCLHPGDIRVLDAIYSEELEEKGLRDCLVFPQKGHRPHPNECSGGDLDGDLFFISWDKDLIPCQTEAPMDYTGRRPRIMDHKVTLEEIQQFFVDYMINDTLGAISTAHLVHADREQDKAKSRKCLELAELHSMAVDFAKTGAPAAMPRVLKPREFPDFMERVDKPMYISKGVLGKLYRAIIESQMQIRYSFVWSEKHAEEAYDRSLEVNGFEAFLETASTHKEMYAEKMSSLMDFYGAETEDEMLLGNLQNRASYLQRDNRRYGDMKDRILLSVKNLQREAKEWFETSCEPHEYKPMASAWYHVTYHPSYYCRESPCFLSFPWIVGEILLQIRSVSKGVHK

SEQ ID NO: 139 - protein, 1127 aa, Z. mays
MSTAAPAPGSTATVRVSNIPASAIAAELLAFFDSAVTIAGATFACEIVAAHRGWLSRGHGFVQFDSSAAATHAIDLASSGRLPPFLGSCLSVSPARADLLPRAPDLSLRAASASLILGNRVAERELEVAYSCDGVRAEVIPRMRRVDLYLKHDSQSYKLEVLFEDINECFGCHLDGTGAILLQLTYAPRIHIAISGSTVKSRFTDDRFHACKEDAKFAWVRALDFTPNSSFGECSTLVLKLSKGASVSYILESLPFSGELGELAIASMDVFGSSSNVVPLVDCPNGFSVPYEVLFRLNSLVHMGKLVARHVNADLFKVLEDLSIDTLRRIFEKMSKLKSTCYEPLQFIRHEAHSMNMRKKALSNKRESGKLMRCYRIHITPSKIYCLGPEEEVSNYVVKYHSEYASDFARVTFVDEDWSKLSPNALSARTEQGFFSKPLKTGLYHRILSILKEGFCIGPKKYEFLAFSASQLRGNSVWMFASNSSLTAENIRRWMGHFEDIRSVSKCAARMGQLFSSSRQTFEVSSYDVEVIPDIEVTTDGTKYIFSDGIGKISTRFARQVAKLIGLDPAHPPSAFQIRYGGYKGVITIDPTSFFNLSLRPSMKKFESKSTMLNITNWSKSQPCYVNREIISLLSTLGIKDEVFESMQQDDMHESDGMLTNKEAALSVLGKIGGGDTKTAADMLLQGYEPSSEPYLLMILKAHRANRLTDIRTRCKIHVQKGRVLIGCLDETCKLEYGQVYIRITKNHKEQKYSEQPFFCNDDGKTAVIVGKVAITKNPCLHPGDVRVLEAVYDPGLDARGLIDCVVFPQRGERPHPNECSGGDLDGDLFFITWDDKLIPEKVDAPMDYTATRPRIMDHAVTLEEIQKHFVSYMINDTLGAISTAHLIHADRDPLKARSPECVQLAALHSMAVDFAKTGAPAEMPLALRPREFPDFMERWERPMYVSNGVLGKLYRAALRHEEDAEALLPAGPPSCVYDPDLEVAGFDEFLDAAEERYEAYAERLGALMTYYSAEREDEILTGNIRNKLVYLRRDNKRYFEMKDRIIAAVDALHAEVRGWLRACKEDDASRVASAWYHVTYHPDRRGEKRFWSFPWIICDTLLAIKAARRCRKRVEDAAVPMDCDGS

SEQ ID NO: 140 - protein, 1128 aa, S. Bicolor
MSMAAPAPGATATVRVANIPASAIAAELLAFFDSAVTTTGAAFACEIAAAHRGWLSRGHGSVQFDSSAAAIHAIDLASSGRLPPFLGSCLSVSPAHADLLPRAPDLSLRAADAGLILGNRVAERELEAAYSWDGVRAEVIPRKRRVDLYLKQDSRSYKLEVLFEDIRECFGCHLDGTGAILLQLTYAPRIYTAISGSTVKSRFTDDRFHACKEDAKFAWVRALDFTPNNSFGECSTLVLKLSKGVPVSDILESLPFSGELEELAISSMLAFGSSSNVVPLVDCPNGFSVPYEVLFRLNSLVHMGKLVARHVNADLFKVLEELSIDTLRRIFEKMSKLKSTCYEPLQFIRHEAHSMSKSKKAFLSNKKDGGKLMRCYRIHITPSKIYCLGPEEEVSNYVVKYHSEYASDFARVTFVDEDWSKLSPNALSARTEQGFFSTPLKTGLYHRILSILKEGFCIGPKKYEFLAFSASQLRGNSVWMFASNNSLTAESIRRWMGHFEDIRSVSKCAARMGQLFSSSRQTFEISSYDVEVIPDIEVTSDGTKYIFSDGIGKISTRFARQIAKLFGLDPAHPPSAFQIRYGGYKGVITIDPTSFFNLSLRPSMKKFESKSTMLNITNWSKSQPCYVNREIISLLSTLGIKDEVFESMQQDDMHESDGMLTNKEAALSVLGKIGGADTKTASEMVLQGYEPSSEPYLLMILKAHRANRLTDIRTRCKIHVQKGRVLIGCLDETCTLDYGQVYIRITKNRKEQKYSEQPFFCNDDGKTAVIVGKVAVTKNPCLHPGDVRVLEAVYDPALDARGLIDCVVFPQRGERPHPNECSGGDLDGDLFFITWDDKLIPEKVDAPMDYTATRPRIMDHAVTLEEIQKHFVNYMINDALGVISTAHLIHADRNPLKARSPECLQLAALHSMAVDFAKTGAPAEMPVALRPREFPDFMERWERPMYVSTSVLGKLYRAALRHEENAEALLPAGPPRCVYDPDLEVAGFDKFLDTAEEQYEVYAEKLGTLMTYYSAEHEDEILTGNIRNKLVYLRRDNKRYFEMKDRIIAAVDALHAEVRGWLRARKEDDASKLASAWYHVTYHPDRRGEKRFWSFPWVACDTLLAIKAARRCRKRVEDAAAPMDCDAS

SEQ ID NO: 141 - protein, 1027 aa, O. Sativa
MGVKTLQVSGFALDDSADYVKDLLERIVGCGNVYAVKLRHPKNVTATSRAYAIVQFQTEEHASLVKNAAQRKILRRGHYYLKVHPSDRDIVPRPRVSMFKLEDVTLHFGCLLKETILSALWSRKGVSVEFGFNLKKIYFYLQLPNSSIEYKLELSHESIWEIQLQRPPKSQTKFLLIQVQAAPKIYEQTPRRSGVMYEDPLFNYFRDHTDDQWTRTTDFTSSSSIGQSYILCLEVPRRCDLPNIRDYFFYYHEYNHDFECRSGGYPYSSDTRFVPIVKSRGYVPYEILFKINHLVQNGTLSGPTVDDSFFRLVSPAFVPIDHIKRALEMMSYLKKTCLNPTMYFYGPEINVSNRVVRNFSSDIENFLRISFVDEDCEKLRATDLSPRSASGHDANRTALYKRVLSVLSDGITIGGKNFEFLAFSSSQLRDNSAWMFASRQGLAASDIRTWMGDFRNIRNVAKYAARLGQSFSSSTETLKVQKYEVEEISDIKNGTQHVFSDGIGKISSAFANEVAMKCNLKRFAPSAFQIRYGGYKGVVAVDPTSRWKLSLRKSMLKFQSDNITVDVLAYSKYQPGFLNRQLITLLSTLGVRDSVFEQKQEEAVNQLNKMVTDPQAAIEAIELMPMGEITNAVKELLLCGYQPDDEPYLSMLLQTFRASKLLELKTKSRILIPKGRAMMGCLDETRTLKYGQVFIRATSGVNDNDRPHPNECSGSDLDGDIYFVSWDPSLIPPRMVTPMDYTPAPTETLDHDVTIEEVEEYFTNYIVNESLGMIANAHVVFADKEDLKAESSPCIELAKLFSIAVDFPKTGVPALIPPELHVKEYPDFMEKLDKVTYESKGVIGKLYREIKKHTPHIKHFTREVARRSYDTDMIVDGYEDYITEAMALKDEYDFKLGNLMDHYGIKSEAEIISGCILKMAKNFTKKSDADAIRLAVRSLRKEARSRFSEMSLDDNGHGHDASEAKASAWYHVTYHPEFWGCYNEGYERPHFISFPWCIYEKLLRIKQRRKFVRKMQPELFSLHNLRI

SEQ ID NO: 142 - protein, 1140 aa, B. Distachyon
MAAAVPEPISTATVRVSNIPRLAVAAELLAFFDSAVAAVGTTFACEIVAAHRGWQSRGHGTVQFDSAATASLAAELASSGRLPRFLGSPLSVSPAPADLLPRAPAPSLRASGARLLVGNRVAERELEMAETLDGVRVEVIPGKRRVDLYLTHDSHRYKLEVLFEDIRNCFRCSLDGTSAILLQLTYAPRIHTAFSGPAVYSRFKDDRLHACKEDAKFTWVRALDFTPNQSFGKCSTLVIKLDEDALMSYILNTLPFSGVLGELAISSMDVVGPSSKAVPLVDCPHGCSVSYEVLFRLNSLVHMGKIVAKHVNAKLFAFLEQVPLHISRRIFEKMSKLESTCYEPLQFIESELKLTHNALLSSKREGEGKLMRCYRIHITPSKIYCLGPEEEASNYVVKHHSEYASDFVRVTFVDEDWSKLSVNAISARIEQGFFSQPFKTGLYYRILSILKEGFIIGPKKFEFLAFSASQLREGSVWMFASNDSLNAESIRRWMGHFEEIRSVSKCAARMGQLFSSSRQTVEVRPWDVEEIPDIEVTTNNTKYIFSDGIGKMSVRFAREIAYRIGLDHTNPPSAFQIRFGGYKGVIAVDPSSFRNLSLRPSMRKFESDCRMLNITSWSKSQPCYVNREIISLLSTLGIRDEVFELMQQDDMRELDEMLTNKEVALSVLGKIGSAETKTAADMLLQGYEPISEPYLLMILKAHQDNRLTDIRSKFKIHVPKGRVLLGCLDETGKLKYGQVYIRITKNNKEQKENEQPYFSEDDGKTVTLVGKVAVSKNPCLHPGDVRVLEAVYDPGLHAKKLVDCVVFPQRGERPHPNECSGGDLDGDLYFVTWDDKLIPEKADAPMDYTGARPRIMDHVVTLEEIQQHVVNYMLSDSLGAISNAHLIHADRDPMKARSPECLQLAALHSMAVDFAKTGAPAELPRSLRPREFPDFMERWDKPMYISNGVLGKLYRAAVSRMESSHALASQVQSSPTYDRELAVPGFEEFLEDAEKHYDLYVEKLTTLMNYYGAEHEDEILTGNIRNRLLYLRKDRKRYSDMKDRIFDSVNALHEEVRGWFKNCLKAEEEASRVASAWYRVAYHPDHRRPEKKQFWSFPWIICDKLLAIKATKSNRCRKLVGVATGVDPMDCVPAKRMRRI

SEQ ID NO: 143 - protein, 1110 aa, P. trichocarpa
MEVVAERPSVRVTNIPQTITAKEILQYLVAQLGKDSVFAIEISTVRKNWNSRGFGRVQFSSLEVKHEALSLSLKNKLVLKSQNLKLSETYDDIIPRPVKDQNRMENGVLYVGFMKKETTLCVLEYWEGVRGWFMPERRRIEFWIRVGQEFRYKLVVEFEDILEAVGYPLDGDKVNAVVLKLRYGPRIYQKISGPGIASKFSTNRYFYCKEDFDFLWVRTTDISAIKSIGQSTSFCWEIGEGLEASDTFRNFPYYQEDMNRLDLEDGEEFCSASETVPLIRCGSDKLAYEVLFQLNSLVHTQKISLAAVDSDLIKILRNLTVNTAIIILQKLHKLKMTCYDPLSFVKQSLRESLSSPPKSLTENNIMSCHRALITPSKIFCLGPEYETSNYVVKHFAQYASDFIRVTFVEEDWSKLPANAISTSIQRGIFAKPFRTGIYHRILSILRDGFVIGAKRFEFLAFSASQLRSNSVWMFASNNGVKAEDIRKWMGCFDKIRSVSKCAARMGQLFSSSLQTFVVPVQDVEIIPDIEVTTDGIDYCFSDGIGKISLSFAKQVAHKCGLSHTPSAFQIRYGGYKGVVAVDRNSFRKLSLRSSMLKFDSENRMLNVTKWSESMPCYLNREIISLLSTLGVADEIFQALQQKQLYRLRKMLTNKESALDVLENLAWADSKNILVQMLLQGYEPNVEPYLSMMLQAYHENSLMELRSRCRIFVPKGRILIGCLDESGILDYGQVYVRITMTKAELQCCDQSFFRKVDESTSTIIGEVAVTKNPCLHPGDIRVLEAVYDVELEEKGLVDCIIFPQNGGRPHPNECSGGDLDGDQFFISWDEGLLPCHTEAPMDYVGGRQRIMDHNVTLEEIQRFFVDYMINDTLGAISTAHLVHADCEPDKARSEKCLQLATLHSMAVDFAKTGAPAEMPLYLKPREFPDFMERAEKQMYISDGVLGKLYRDIHDSTRQERSNFMWSKKIAEATYDQDLEVKGFEDFLGIASIYKEKYMEKMSTLMDYYGAKTEDEILTGNLRHRPTYLQRDNRKYGDVKDRILVSLKNLKKEAKEWFESSCNPTEHQCMASAWYHVTYHPTYFHERMNCLSFPWIVGDILLNIKSLNSRNA

SEQ ID NO: 144 - protein, 1129 aa, B. Napus
MVSEITRSTVKLTNVPQTIIAEELLRFLELHLGADSVFALEIPTSRDNWKPRDFALVQFTSLEAKSRAQHLSSQSKLLFKSRNLRVSEAYDDIVPRPVDPRRRLDGVVLTAGFPESEEGRFCALEKWEGVRCWVIEEKRRVEFWVWESGDCYKCEVRFEDIAETVPSCVDGVDEINAFLLRLKYGPKIYKQVSGPHIATKFKSGRYSFCKEDFDFMWIRSTDFSGLKSIGTSTCFCLEVDNASTMSDIFSSLPYYREDTLSLTLVDGYTFASANQIVPLLNAANLGIEIPYEILFQLNSLVHAQKISLFAASNMGLISILCGLSLETALVILKKLHQQSSICYDPISFVKAQSQYVVKKTAHSPASAYKRLTEQNIMSCQRAYVTPSKIYLLGPELETANYVVKNFAEHASDFMRITFVEEDWSKIPANALSVNSKEGYFVKPFRTNIYHRVLSILGEGITVGPKKFEFLAFSASQLRGNSVWMFASNEKVKAEDIREWMGCFRKIRSISKCAARMGQLFSASRQTLNVRAQDVEQIPDIEVTTDGADYCFSDGIGKISLAFAKQVAQKCGLSHIPSAFQIRYGGYKGVIAVDRSSFRKLSLRDSMLKFDSNNRMLNVTRWTESMPCFLNREIICLLSTLGIEDAVFEAMQAGHLSILGNMLEDRHAALNVLQKLSGESSKNLLVKMLLQGYAPSSEPYLSMMLRVHHESQLSELKSRCRILVPKGRILIGCMDEMGILEYGQVYVRVTLTKAELESREQSHFRKIDEETSVVVGKVVVTKNPCLHPGDIRVLDAIYEVNFEQKGFLDCIVFPQKGERPHPNECSGGDLDGDQFFVSWDEKLIPSQMDPPMDYAGSRPRIMDHDVTLEEIHKFFVDYMISDTLGVISTAHLVHADRDPERARSQRCIELANLHSRAVDFAKTGAPAEMPYALKPREFPDFLERFEKPMYISGSVFGKLYRAVKSTLAQRKPEDAESEDKKKMAAYDSTLEEAGFDNFIETAKAHRDMYAEKLSSLMNYYGAANEEEILTGILRTKEMYLQRDNRRYGDMKDRITLSVKDLQREAMGWFEKSCEDEQQRKKLASAWYYVTYNPSYCDEKPRFLSFPWIVGDVLLGIKAESAEGEREMMIA

SEQ ID NO: 145 - protein, 1172 aa, Arabidopsis thaliana
MPDMDIDVKDLEEFEATTGEINLSELGEGFLQSFCKKAATSFFDKYGLISHQLNSYNYFIEHGLQNVFQSFGEMLVEPSFDVVKKKDNDWRYATVKFGEVTVEKPTFFSDDKELEFLPWHARLQNMTYSARIKVNVQVEVFKNTVVKSDKFKTGQDNYVEKKILDVKKQDILIGSIPVMVKSILCKTSEKGKENCKKGDCAFDQGGYFVIKGAEKVFIAQEQMCTKRLWISNSPWTVSFRSENKRNRFIVRLSENEKAEDYKRREKVLTVYFLSTEIPVWLLFFALGVSSDKEAMDLIAFDGDDASITNSLIASIHVADAVCEAFRCGNNALTYVEQQIKSTKFPPAESVDECLHLYLFPGLQSLKKKARFLGYMVKCLLNSYAGKRKCENRDSFRNKRIELAGELLEREIRVHLAHARRKMTRAMQKHLSGDGDLKPIEHYLDASVITNGLSRAFSTGAWSHPFRKMERVSGVVANLGRANPLQTLIDLRRTRQQVLYTGKVGDARYPHPSHWGRVCFLSTPDGENCGLVKNMSLLGLVSTQSLESVVEKLFACGMEELMDDTCTPLFGKHKVLLNGDWVGLCADSESFVAELKSRRRQSELPREMEIKRDKDDNEVRIFTDAGRLLRPLLVVENLQKLKQEKPSQYPFDHLLDHGILELIGIEEEEDCNTAWGIKQLLKEPKIYTHCELDLSFLLGVSCAVVPFANHDHGRRVLYQSQKHCQQAIGFSSTNPNIRCDTLSQQLFYPQKPLFKTLASECLKKEVLFNGQNAIVAVNVHLGYNQEDSIVMNKASLERGMFRSEQIRSYKAEVDAKDSEKRKKMDELVQFGKTHSKIGKVDSLEDDGFPFIGANMSTGDIVIGRCTESGADHSIKLKHTERGIVQKVVLSSNDEGKNFAAVSLRQVRSPCLGDKFSSMHGQKGVLGYLEEQQNFPFTIQGIVPDIVINPHAFPSRQTPGQLLEAALSKGIACPIQKEGSSAAYTKLTRHATPFSTPGVTEITEQLHRAGFSRWGNERVYNGRSGEMMRSMIFMGPTFYQRLVHMSEDKVKFRNTGPVHPLTRQPVADRKRFGGIKFGEMERDCLIAHGASANLHERLFTLSDSSQMHICRKCKTYANVIERTPSSGRKIRGPYCRVCVSSDHVVRVYVPYGAKLLCQELFSMGITLNFDTKLC

SEQ ID NO: 146 - protein, 1169 aa, A. lyrata
MDINEMDIDEIEIAGQMNLSELGETFLQSFCKKAATSFFEEFGLISHQLNSYNFFIEHGLRNVFESFGEMLVEPSFDVIKKKDGDWRYATVKFGEVTFEKPTFFSDDKELEFLPWHARLQNMTYSARIKVNVQVEVFKKTVVKSDKFKTGQDEYVEKEILDVKKQDILIGSIPVMVKSVLCKTSEKGKENCKKGDCAFDQGGYFVIKGAEKVFIAQEQMCTKRLWISNSPWTVSFRSETKRNRFIVRLSENEKADDYKRREKVLTVYFLSTEIPVWLLFFALGVSSDKEAMDLIAFDGVDASITNSLIASIHEADAVCEAFRCGNNALTYVEHQIKSTKFPPAESVDDCLRLYLFPGLQGLKKKARFLGYMVKCLLSAYAGKRKCENRDSFRNKRIELAGELLEREIRVHLAHARRKMTRAMQKQLSGEGELKPIEHYLDASVITNGLNRAFSTGAWSHPFRKMERVSGVVANLGRANPLQSLIDLRRTRQQVLYTGKVGDARYPHPSHWGRVCFLSTPDGENCGLVKNMSLLGLVSTQVLESVVEMLYACGMEELMDDTSTPLCGKHKVLLNGDWVGLCADSESFVAELKSRRRQSELPREMEIKRDKDDNEVRIFTDAGRLLRPLLVVENLHKLKQDKPTQYPFKHLLDQGILELIGIEEEEDCNTAWGIKQLLKEPKNYTHCELDLSFLLGVSCAIVPFANHDHGKRVLYQSQKHCQQAIGFSSTNPNIRCDTLSQQLFYPQKPLFKTVASECLKKEVLFNGQNAIVAVNVHLGYNQEDSIVMNKASLERGMFRSEQIRSYKAEVDTKDSEKRKKMDELVKFGKTYSKIGKVDSLEDDGFPFIGANMSTGDIVIGRCTDSGADHSIKLKHTERGIVQKVVLSSNDEGKNFAAVSLRQVRSPCLGDKFSSMHGQKGVLGYLEEQQNFPFTIQGIVPDIVINPHAFPSRQTPGQLLEAALSKGIASPIQKKEGSSAAYTKLTRHATPFSTPGVTEITEQLHRAGFSRWGNERVYNGRSGEMMRSLIFMGPTFYQRLVHMSEDKVKFRNTGPVHPLTRQPVADKKRFGGIKFGEMERDCLIAHGASANLHERLFTLSDSSQMHICRKCKTYANVIERTPSSGRKIRGPYCRVCASSDHVVRVYVPYGAKLLCQELFSMGITLNFDTKLC

SEQ ID NO: 147 - protein, 1197 aa, C. Sativus
MGTSGAKDDIEMNSEGEDLSPGMDLDTDDDDDYYSEPVNIHDLGEAFLKDFCKKSSMAFFNQYGLISHQINSYNDFIKNGIQKAFDFFGDILVQPGYDPSKKGDGEWRYATVKFGKVTLDKPKFWGGAASGKEYNMLPRHARLQNMTYSSRMKINISLEIYTQKLVSSDKFKTGKDQYVDKEPVEGASDNRDVFIGRLPVMVNSDLCWMKDGQKRDCEFDRGGYFLIKGAEKIFIAQEQICLRRLWISNVQGWTVAYRSEVKRNRLIIRLVENSKSEDLKSKEKVLNVYFLSTEVPVWILFFALGVSSDKEIVDLIDYGRDDPTVLNILFASVREVDNDDKWKDFRRGKRALTFLDNEIRKTSFPPADKIEDCLNLYLFASLKGSKQKCHFLGYMVKCLLQAYTGRRKCDNRDDFRNKRFELAAELLERELKVHIAHARRRMEKALQRDLYGDRQVHPIEHYLDASIITNGLSRAFSTGAWAHAFKRMERISGVVATLGRANPLQTMAELRRTRQQVAYTGKVGDARYPHPSHWGRVCFLSTPDGENCGLIKNLSGTGLVSLNTKKSITPTLFRCGMENLVDNTSTSFCGKYRIFLDGEWVGVCEDSLSFVTNVRRKRRRNPFLHQVEVKRDEQLKEVRIFSDAGRILRPLLVVENLNRIDKSKGENYTFQSLLDKGIIELIGTEEEEDCRVAWSIKHLMEDEGTTKYSHCELDMSFLLGLSCGLVPFANHDHARRALFQSQKHSNQAIGFSPTNSNFRVDTLSHQLHYPQRPLFRTMTADCLGTPGYLSSHAGILPKPEFYNGQNAIVAVNVHLGYNQEDSLVMNRASLERGMFRSEHIRSYKAEVDNKESSEKRRKSDDAINFGKTQSKIGRVDSLDDDGFPYIGANLQSGDIVIGRCAESGADHSIKLKHTEKGMVQKVVLSSNDDGKNYAVVSLRQVRSPCLGDKFSSMHGQKGVLGFLESQENFPFTIQGIVPDIVINPHAFPSRQTPGQLLEAALGKGIAAGGSLKYATPFSTPSVDAITDQLHRAGFSRWGSERVYNGRTGEMMRSLIFMGPTFYQRLIHMAEDKVKFRNTGPVHPLTRQPVADRKRFGGIKFGEMERDCLIAHGASANLHERLFTLSDSSQMHVCQKCKNVASVIQRSVAGGRKMRGPYCRVCESFDDIVRVNVPYGAKLLCQELFSMGINLKFETQLC

SEQ ID NO: 148 - protein, 1220 aa, V. vinifera
MKRSGALKCLVFIVHSHKSIFCSLHAECVNLNISTLMGASDAKGDLGMSSSMGEKLSNGVQMEIDDDLMGSIEIDDLNKEYLKTFCKKVAVSFFNEYGLIQHQINSFNDFIKNGIQRVFDSFGEIPVEPGYDPSKRGEGDWRYASVRFGKVTLERPRVWAGESDGKESLNFLPRHARLQNMTYSSRMKAQVHFQVYTQKLVRSDKYKTGKDNKYVEKKVIFEDNRDILIGRIPVMVKSELCWMNGVERGDCEYDHGGYFLIKGAEKTFIAQEQICLKRLWVSSNPTWMVAYRPIWKRKRVYVKLEPPKDENNRGGEKVLTVYFSSTEIPIWILFFALGASSDKEVVDLIDFNIDDAGISNILVASIHEADREAEKKGMYFRRQGNAISFVDKLVKSCKFPPGESIQECISKYLFPNFSGVKQKARFLGYMVKCLLQAYTGRRKCDNRDDFRNKRLELAGELLERELRVHIRHAERRMVKAMQRELYGDRDLRPIENYLDASIITNGLSRAFSTGQWSHPFKRMERISGVVATLRRTNPLQMTADMRKTRQQVQYTGKVGDARYPHPSHWGKVCFLSTPDGENCGLVKNLAITGLVSTEVLDPLVDKLFDCGMEKLVDDTSTKLSGKNKVFLDGDWVGVCEDPISFVVELRTKRRHKELPQQVEIKRDEQQGEVRIFSDAGRILRPLLVVENLKKVKTFKGDDFTFQSLLDKGIVELIGAEEEEDCSTAWGIKYLLKGHDDPPVKYTHCELDMSFLLGLSCGIIPYANHDHARRVLYQSEKHSQQAIGFSTTNPNIRVDTLSHQLYYPQRPLFRTMISDLPRPEYFNGQIAIVAVNVHLGYNQEDSLVMNRASLERGMFRSEHIRSYKSEVDNNESLDKKRKSEDSVHFGKMQSKIGRVDSLDDDGFPFIGANLQNGDIVIGRCAESGVDHSIKLKHTERGMVQKVVVSANDDGKNFAVVSLRQVRTPCLGDKFSSMHGQKGVLGFLESQENFPFTIQGIVPDIVINPHAFPSRQTPGQLLEAALGKGIACGGLLRHATPFSTLSVDAIADQLHRAGFSRWGHERVYNGRTGEMLRSLIFMGPTFYQRLIHMAEDKVKFRNTGPVHPLTRQPVSDRKRFGGIKFGEMERDCLIAHGAAANLHERLFTLSDSAYMHICRRCKNISNVIQRSVAGGRKVRGPYCRYCESSEEIVKVNVPYGAKLLCQELFSMGISLKFETQLC

SEQ ID NO: 149 - protein, 1188 aa, M. truncatula
MEHIGSSKDANNTNYTEMDIDLDDDEDQSNAEILNELGDDMVKYFCKKASVMFFDQYGLISHQINSYNQFINSGLQSAFDSFGDLTVTPGFDPSKKGADEHYRYATVKFGKVTLERPKFWCGEGNAQELKMLPRHARLQRMTYASKMKVDVHIQVYVMKKVRSDKFKTGKEEYIDKDIKWEDTREITIGRLPVMVKSDLCWMSEAEKGDCEFDHGGYFLIKGAEKIFIAQEQIFLKRLWVSNIPYWAVAFKSQMKRNRMVVKLVEGSTEGITNGEKLLTVYFLSVEIPVWILFFALGVTSDKEIVDLIDYGEANGRIENILFASIREADDKCEAFRRGKNALLFLEERVKGVQFPPAESIDECFNMYVFPNVKGLKRKARYLAYMVKVLLLAYTGRRKTDNRDDFRNKRLELAGELLEREIKVHFAHARKRMGKALQRDLYGEREVRQIEHYLDASIITNGLQRAFSTGAWTHPFKRMERISGVVATLGRTNPLQTMAELRRTRQQVQYTGKVGDARYPHPSHWGKVCFLSTPDGENCGLVKNLAVTGVVSTDVTESILPQLSDCGMEELVDDTTTVLGKKDKVFLNGDWVGVCSDSISFVAELRTRRRRNELPHQVEIKRDQCQQEVRILSDAGRILRPLLVVSNLLKIKGSKSEHKSFQSLLDNGVIELIGPEEEEDFKTAWGVQYLFGKEGKSSVKYTHCELDMSFLLGLSCSLVPFANHDHARRVLYQSQKHSSQAIGFATTNPNIRVDALSHQLFYPQRPLFQTMTSDCLGKPGYLGQSKVVPKSEFYNGQNAIVAVNVHLGYNQEDSLVMNRASLQRGMFRSEHIRSYKAEIENKESSEKRKKPEDIVNFGKIQSKIGRVDSLDDDGFPFVGANLQSGDIIIGRCADSGTDHSIKLKHTERGYVQKVVLSSNDEGKNFAVVSLRQVRSPVLGDKFSSMHGQKGVLGFLESQENFPFTKQGIVPDIVINPHAFPSRQTPGQLLEAALGKGIACVGSLRNATPFSTSSVEAITDQLHRAGFSRWGNERVYNGRTGEMVRSLIFMGPTFYQRLHHMSEDKVKFRNTGPVHPLTRQPVADRKRFGGIKFGEMERDCLIAHGASANLYERLFTLSDSSQIHICSKCKNVANVILRPVSGGRKIRGPYCRFCESADDIVVASVPYGAKLLSQELFSMGINLKFETELC

SEQ ID NO: 150 - protein, 1203 aa, R. Communis
MVEYDDAMEQDNDIGTSSKTEKLFKASTDMDIDFDSDSGSDCDFMDSSTSLTDIGEAKLKDFCNKAATLFFNEYGLISHQINSYNDFINNGIQKAFDSFGELVVEPGYDPSKKGENEWRYASVKFGKVALEKPTFWSGADEHKMLPRHARLQNMTYSSKMKVNVSVEVYTRKVVRSDKFKTGKDQYVDKEVLNTDNRNITIGSLPVMVKSDLCWMKTAEKGDCDFDHGGYFLIKGAEKVFIAQEQICLKRLWISNIQGWTVSYKSEIKRNRLIVRLVGLSALEDVKAEKKCLTVYFLSTEIPLWILFFALGVTSDKEVIDLIGYGSNDARIVNIFFASIHDADEKTEGFRRGKEALEYVVRQIRGTRFPPGENEDFFLLYLFPTLHSLRQKARFLGYMVKCLLQAYNGQRKCNNWDSFRNKRFELAKELLERELKVHIAHARRRMAKALQKDLYGDRDVRPIEHYLDASIVTNGLSRAFSTGAWSHPYKRMERISGVVANLGRANPLQTMVDLRKTRYHVQYTGKVGDARFPHPSHWGRVCFLSTPDGENCGLVKNLATTGLVSVNILEPLIDKLIARGMEKVPEDSHSDLDEKDKVFLNGEWVGVCEDSRLFVAELRRLRRRKKLPQQVEIKRDEQQQEVRIFSDAGRILRPLLVVQNLHKIEAFKGGNCTFQSLLDKGIIEFVGTEEEEDCSTAWGIKFLLSGVDGKQSLKYTHCELDMSFLLGLSCGIIPFANHDHARRVLYQAQKHSQQAIGFPTTNPNIRVDTLSHQLYYPQRPLFRTVTSDCLGKPGDTRGHNGIVPKPELYNGQNAIVAVNVHLGYNQEDSLVMNRASLERGMFRSEHIRSYKADVDNKELLDKRRKYDDNVNFGKIPSKIGRVDSLDDDGFPFIGANLQSGDIVIGRCAESGPDHSIKLKHTERGMVQKVVLSSNDEGKNFAVVSLRQVRSPCLGDKFSSMHGQKGVLGFLESQENFPFTRQGIVPDIVINPHSFPSRQTPGQLLEAALGKGIACGGSMKYATPFSTLSVEAITNQLHRAGFSRWGNERVYNGRTGEMVRSLIFMGPTFYQRLIHMAEDKVKFRNTGPVHPLTRQPVADRKRFGGIKFGEMERDCLIAHGASANLHERLFTLSDSSQMHICQKCKNVANVIQRAVPGGRKIRGPYCRVCESVDEIVKVNVPYGAKLLCQELFSMGISLKFETRLC

SEQ ID NO: 151 - protein, 1205 aa, G. max
MGHVGSSKDGTKVGLSAAAMDIDDDDDDDDDDLGDVDLDPTNSEILEELGEDMVKYWCKKASMLFFDEYGLISHQINSFNHFVAIGLQNTFDSFGDLVVTPGFDPSKKGENEHFRYASVKFGKVKLDKPMFWGGEGNAQEFKMLPRHARIQRMTYASKVKIQVKVQVYVPKKVRSDKFKTGKEEFLDREIMKEDEREIIIGRLPVMVKSDLCWMKDAEKDDDEFDHGGYFIVKGAEKTFIAQEQLYLKRLWVMNSPGWMIAYKSQMKRNRMVIKLVGNSRSEEVENGDMCLTVYFLSVEVPVWVLFFALGVSSDKEIVDLIGCGNDDVRIQNILFASVRDADEKCGAFRRVRNAVQYLEKCVKSVQFPPSESMQECLEMYVFPGISGLNRKARFLAYMVKGLLLAYTGRRKCDNRDDFRNKRLELASELLDRELKVHVAHARKRMAKALQRDLYGDRDVRPIEHYLDASIITNGLQRAFSTGAWSHPYKRMERISGVVANVGRTNPLQTMAELRRARQQVQYTGKVGDARYPHPSHWGKVCFLTTPDGENCGLVKNLSVTGLVSTDVTDVTESILLKLVDCGMQELVDDTSTHLGSMDKVLLNGDWVGVCPDSSSFVAELRSRRRRNELPHQVEIKRDQSQHEVRIYSDAGRILRPLLVVGNLLKIKGFKSDRYSFQSLLDKGVIELIGPEEEEDCCTAWGVEYLFGKEGKRSVKYTHCELDMSFLLGLSCSLVPFANHDHARRVLYQSQKHSSQAIGFSTTNPNIRVDTLSHQLHYPQKPLFRTMTSDCLGKPDHSLGQSKIPPKAEFYNGQNAIVAVNVHLGYNQEDSLVMNRASLQRGMFRSEHIRSYKSEIDNKESSDKKRKPEDIVNFAKLQSKIGRVDSLDDDGFPYVGANLQSGDIIIGKCAESGADNSVKLKHTERGYVQKVVLSSNDEGKNFAVVSLRQVRSPVLGDKFSSMHGQKGVLGFLESQENFPFTRQGIVPDIVINPHAFPSRQTPGQLLEAALGKGIACGGILKQATPFSTPSVDAITEQLHRAGFSRWGNERVYNGRTGEMVRSLIFMGPTFYQRLHHMSEDKVKFRNTGPVHPLTRQPVADRKRFGGIKFGEMERDCLIAHGASANLYERLFTLSDSSQIHICSKCKKVANVILRPVSGGRKIRGPYCRHCESADDIVVAHVPYGAKLLCQELFSMGINLKFETQLC

SEQ ID NO: 152 - protein, 1229 aa, Z. mays
MEEPQKDSGQPSKSSDSELEAMVLDDNGAGKSHSMEENRDSPIDVDGGQSSMDVDIKGKSSLSDDVNGKSSSEPYSNAPIDMSVESLEKFCKEASRSFFDEVGLISHQINSYNEFVSHGLQELFDSLGEVIVEPGYDPSKKGSGGWKHAIIKFGRVKLEKPVFWTGKDEGSVDFKPWHARLQNMTYASRLIVEVTIQVYSLEKSDKSKTGNDGFVQKRNFMNETHWIFIGLLPVMVKSNLCLLHSLNESECLFDAGGYFLVKGMEKVFIAQEQRCLRRLWISDRPCWTISFMSEIKRRRIYIKLVESTRSEDFSESKIITISFLYATMPVWLLFFALGISSDKEVFDMIDMQDCDASVINTISATIKESDKLCEDFRKSDKARQYVDELVKSSRFPPAESFDDYIARFLFPDISGNRNKALFLGYMVKCLLMAFTGKRKCDNKDDFRNKRLDLPGELLGRELRAQLRLAEKRMVKAIQRDLNSDRELQDLERYIDASIVTNGLNRAFSTGSWCHPYKRAERCSGIVATLRRTNPLQMMSDLRKTRQRVAYAGKAGDARYPNPSYWGKLCFMSTPDGENCGLVKNLAVTAIVSSRVMQPLIESFISCGMSKLNDIPTEHIQRMDKIFLNGNWVGSCENSASFVFRLRCMRRSSLIDPQVEIKRDKHHNEVRVFTDAGRILRPLLVVENLNKIRKPKGRSFSFHELMQQEIIEFIGVEEEEDIQCAWGIRHLFESEGAISSYTHCELDPSFLLGLSCGIIPFANHNFARRVLYQSEKHSQQAIGYSTTNPHIRVDTLSHQLYYPQRPLFKTVIADCLGRSDYASFGRKNDFARPEYFNGQNAIVAVNVHQGFNQEDSLVMNRASLERGMFRTEHLRSYKADVENKDGTKRLKLKEKIDFGKTESKRGRVDNLDDDGLPYVGASLQTNDIVIGKVSESGEDHSIKLKHTEKGMVQKVLLSANDEGKNFAVVTLRQVRTPCLGDKFSSMHGQKGVVGFLESQENFPFTHEGIVPDIVINPHAFPTRQTPGQLLEAALGKGIACKGTMRYATPFTTASVDVIAEQLHRAGYSRWGSENVLNGRTGERVQSLVFMGPTFYQRLIHMSEDKVKFRNTGPVHPLTRQPVADRKRFGGVKFGEMERDCLLAHGSAANLHERLFLLSDFSQMHICQTCERVANVVMRSVPGGKKIRGPYCGFCKSSENIVRINVPYGAKLLYQELFSMGICLKFETQVC

SEQ ID NO: 153 - protein, 1228 aa, S. Bicolor
MEELQKDGGQQSNGSDSEPEAMVLDDNGAGKSHSMDGNRDSPVDVDEGQSSMDVDTKGKPSLNDDVNGKSSEPYSNAPIDLSVESLEKFCKEASRSFFDEVGLISHQINSYNDFVSHGLQELFDSLGEVIVEPGYDPSKKGSGGWKHAIIKFGRVKLEKPVFWTGKDEGSVDFKPWHARLQNMTYASRLIVEVNIQVYSLEKSDKSKTGNDGFVQKRDFMNETHWIFIGLLPVMVKSNLCLLHSLKESECLFDAGGYFLVKGMEKVFIAQELRCLKRLWIIDRPCWMISFMSEMKRRRIYIKLVESTRSEDFSGSKIISISFLYATMPVWLLFFALGISSDKEAFDVIDMQDCDASVINTISATIKESDELCEGFRKSDKARQYVDELVKSSRFPPAESFDDYIARFLFPDISGNRNKALFLGYMVKCLLMAFTGKRKCDNKDDFRNKRLDLPGELLGRELRAHLRLAEKRMVKAIQRDLNSDRELQDLERYIDASIVTNGLSRAFSTGSWCHPYKRAERCSGIVATLRRTNPLQMMSDLRKTRQRVAYAGKAGDARYPNPSYWGKLCFMSTPDGENCGLVKNLAVTAIVSSRVVQPLIESFISCGMSKLNDIPTEHIQRMDKIFLNGNWVGSCKDSASFVFRLRCMRRSSLIDPQVEIKRDKHHKEVRVFSDAGRILRPLLVVENLKKIRKPKGRSFSFQELMQQEIIEFIGVEEEEDIQCAWGIRHLFESEGAISSYTHCELDPSFLLGLSCGIIPFANHNFARRVLYQSEKHSQQAIGYSTTNPHIRVDTLSHQLYYPQRPLFKTVIADCLGRSDYTTFGRKDDFMRPEYFNGQNAIVAVNVHQGFNQEDSLVMNRASLERGMFRTEHLRSYKADVENKDGTKRLKLKEKIDFGKTESKRGRVDNLDDDGLPYIGASLQTNDIVIGKVSESGEDHSIKLKHTEKGMVQKVLLSANDEGKNFAVVTLRQVRTPCLGDKFSSMHGQKGVVGFLESQENFPFTHKGIVPDIVINPHAFPTRQTPGQLLEAALGKGIACKGTMRYATPFTTASVDVIAEQLHRAGYSRWGTENVLNGRTGERMQSLIFMGPTFYQRLIHMSEDKVKFRNTGPVHPLTRQPVADRKRFGGVKFGEMERDCLLAHGSAANLHERLFMLSDFSQMHICQTCERVANVVMRSVSGGKKIRGPYCGFCKSSENIVRINVPYGAKLLYQELFSMGICLKFDTEVC

SEQ ID NO: 154 - protein, 1270 aa, O. Sativa
GFALRRRPSSPPGYSLEVMEEPSKDNGQSSCVVDPELEPMMLDDAREGVSHTLDDANGHSSMDVDRGCHSMDTTRSSLGDDGKGKRDSYAQIPVDMSIPSLEKFCKEASRSFFDEIGLISHQINSYNEFVSHGLQELFDSLGEVTVEPSYDPSNRGPGGWRHAIIKFGRVQLEEPVFWSHGCDIDEQSLKLKPRHARLQNMTYSSKMKVEVHFQVYSMEKSDKAKTGNDKFGYKRNIINETYYINIGRLPVMVMSNLCWLHKLKESDCQFDSGGYFLIKGMEKVFIAQEQKCLTRIWVEDRPCWMVSFLSPIRRRRIYIKLIDSANNEDASGGKIISISFLYANMPIWLMFFALGISSDKDIFDVINMEDCDACVINTITATIKESDELCEGFRKSDKARQYVDELIKNSKFPPAEPFDDYIAKYLFPSISGNRNKALFLGYMVKCLLMAFTGKRKCDNKDDFRNKRLDLAGELLGRELRAHIRHAERLMVKALQRDLNSERELQEFDHYLDASIITNGLNRAFSTGSWCHPYKRNERCAGIVATLRRTNPLQMISDLRKTRQRVAYAGKAGDARYPNPSYWGKLCFMSTPDGENCGLVKNLAVTATVSSRVAPPLIDRFISCGMNKLHEIPTEEVPRMDKIFLNGDWVGSCSDPASFVLRLRCMRRSGLIDPQVEIKRDKHQREVRVFSDAGRILRPLLVVENLNKIRRPKGSSYSFQWLMQQEIIEFIGVEEEEDIRSAWGIRNLFESEEEAPMVKMNKAEDVFNVKRKIGGEVSGYTHCELDLSFLLGLSCGIIPFANHNFARRVLYQSEKHSQQAIGYSTTNPHIRVDTLSHQLYYPQRPLFKTVIADCIGRSEYTFGRKDDFARPEYFNGQNAIVAVNVHQGFNQEDSVVMNRASLERGMFRTEHFRNYKAEVENKGGPGGNKRLKMKDKIDFGKMQSKRGRVDNLDDDGLPYVGASLQSGDIVIGKVSESGEDHSIKLKHTEKGMVQRVLLSANDEGKNFAVVTLRQVRSPCLGDKFSSMHGQKGVVGFLESQENFPFTYQGIVPDIVINPHAFPTRQTPGQLLEAALGKGIALGGTMRYATPFTTASFDVITDQLHKAGFSRWGAESVLNGRTGERMHSLIFMGPTFYQRLIHMAEDKVKFRNTGPVHPLTRQPVADRKRFGGVKFGEMERDCLLAHGAAANLHERLFMLSDFSQMHVCQTCERVANVIMRPVPGGKKIRGPYCGFCRSSENIVRINVPYGAKLLYQELFSMGICLRFETEVC

SEQ ID NO: 155 - protein, 1192 aa, B. distachyon
MILDDNEESGSHTMDDSNGQSSMDIDIEGSSMGEQIPADMNLTSLEKFCKEASRSFFEEIGLISHQINSYNEFISHGLQELFDSLGEVTVEPGYDPSKKGPGGWRHAIIKFGKVKLEEPVFWSGKIDIDEESLKLKPRHARLQNMTYSSKMEVEVNIQVYSMEKSDKAKTGNDHFGHKRDIINETHWVTIGRLPVMVNSDLCWLHKLGESDCLFDSGGYFLIKGMEKIFIAQEQRCLTRIWVADQPCWNVSYLSEMKRRRVYIKLIDSTTNNDLNGAKIISISFLYANMPIWLLFFALGVSSDKEVFDMIDMKDCDASVINAIYATIRESDELCEGFRQSDKARKYVDDLVKSSKFPPAEPFTDYVAKYLFPGISGNRNKSFFLGYMVKCLLMAFTGKRKCDNKDDFRNKRLELPGQLLGRELRAHLRHAERLMVKAMQRDLNSDRDLQFPLRYLDASIITNGINRAFATGSWSHPYIRNERCSGIVATLRRTNPLQMMSDLRKSRQQVAYAGKVGDARYPNPSYWGKMCFMSTPDGENCGLVKNLAVTAIVSSRVVQPLIDRFVSCGMNKLDEISAKEIPKMDKIFLNGDWIGSCTDPASFVMRLRCMRRANLIDPQVEIKRDKHQFPGEVRVFSDAGRILRPLLVVENLNKIRKSKDRPYTFQALLQQEIIEYIGVEEEEDIQCAWGIRHLFPSSGEKVSGYTHCELDLSFLLGLSCGLIPFANHNFARRVLYQSEKHSQQAIGYSTTNPLTRVDTHSHQLYYPQRPLFKTVTADCIGRSDYTIGRKDDFARPEYFNGQNAIVAVNVHQGFNQEDSLVMNRASLERGMFRTEHIRSYKAEVETKEPTKRLKLKEKVDFGKMQSKRGRVDNLDDDGLPYVGASLQSGDIVIGKVSESGEDHSIKMKHTEKGMAQRVLLSANDEGKNFAVVTLRQVRSPCVGDKFSSMHGQKGVIGFLESQENFPFTCQGIVPDVVINPHAFPTRQTPGQLLEAALGKGIALGGAMRYATPFTPASLEVISEQLHKAGFSRSGAESVINGRTGERMHSLIFMGPNFYQRLTHMAEDKVKFRNTGPVHPLTRQPVADRKRFGGVKFGEMERDCLLAHGAAANLHERLFMLSDFSQMHICRTCERVANVVMRSVPGGKRIRGPYCGFCRSSENTVRIAVPYGAKLLYQELFCMGICLKFQTEIC

SEQ ID NO: 156 - protein, 1181 aa, P. trichocarpa
MGASSDYMEDVGPSSKGEVDDMDMDMDEDLMDTTNLNELGKETLQSFCKKAASLFFDEYGLISHQINSYNAFINSGLQRVFDSFGEVAVEPGYDSSKQKDGEWRRASVRFGKVTLDRPSFWGGTSSDAEHNMFPRHARLQNMTYSARMKIHVNVQVYTQTVGRSDKFKTGIDKVVQKNVVHTENREIIIGRIPVMVKSDLCWLTTVEKGDCDFDHGGYFLIKGAEKVFIAQEQICMKRLWISNSQGWTVSYKSEVKRNRLIVRLVELSKLEYIKGEKKGLCVYFLSTEIPLWILFFALGVRSDKEVIDLIDYASNDASIVNIFFASIHDADEKCEHFRREDRALDYVDKLLKKTRFPPKESIEDAISAYLFPRLNSRRHKARFLGYMVKCLLEAYTGHRKCDNRDSFRNKRFELASELLERELKVHVSHALRRMTKALQRDLYGDRDVHPIEHYLDASIVTNGLTRAFSTGAWCHPFKWMERVSGVVGNLGRANPLQTMIDLRKTRQQVLYTGKVGDARYPHPSHWGRVCFLSTPDGENCGLVKNLAVTGVVSTNISESLVDKLFDSGMEKLVDDTYTKLDGKHKVFLNGEWVGVCEDSCLFVGELRSMRRRRELPYQVEIKRDEQQREVRIFSDAGRILRPLLVVENLDKIKAFKGGNYIFTSLLDKGIIEFIGTEEEEDCCTAWGIKFLLADIEGKQPMKYSHCELDMSFLLGLSCGIIPFANHDHARRVLYQAQKHSQQAIGFSTTNPNIRVDTLSHQLHYPQRPLFRTMISDCLVLPKPELFNGQNAIVAVNVHLGYNQEDSLVMNRASLERGMFRSEHIRSYKAEVDNKELTDKRRKSEDSITFGKIQSKIGRVDSLDDDGFPFIGANMQSGDIVIGKCAESGADHSVKLKHTERGMVQKVVLSSNDEGKNFAVVSLRQVRSPCLGDKFSSMHGQKGVLGFLESQENFPFTIQGVVPDIVINPHAFPSRQTPGQLLEAALGKGIACGGSKRYATPFSTLSVDDIIDQLHRAKFSRWGNERVYNGRTGEMVRSLIFMGPTFYQRLVHMAEDKVKFRNTGPVHPLTRQPVADRKRFGGIKFGEMERDCLIAHGASANLHERLFTLSDSSEMHICQKCKNVANVIQRGVPGGRKIRGPYCRVCESVDDLVKVSVPYGAKLLCQELFSMGISLKFDTRVS

SEQ ID NO: 157 - protein, 1169 aa, B. Napus
MTDIDIEEIEAAGEIDLRDLGEPFLQSFCKKAATSFFDEYGLVSHQLNSYNFFIDHGLQSVFESSGEMLVEPSFDPTKNKDHEWRYATVKFGEVSVDKPTLYSDDKELVFLPWHARLQNMTYSARMKVNVDVEVFVKKVVKRDKFKTGQDEYVEKQILSKKTQDIPIGRIPVMVKSVLCNTTERGKHVESYRKGECAFDQGGYFVIKGAEKVFIAQEQICTKRLWISNSPWTVSYRSETKRNRFIVRLSENQKAEDFKRKEKVLTVYFLSTEIPVWVLFFALGVASDKEAVDLIAFDGGDASITNSVVAAIQEADSVCEDFRHGRNALAYVEQQIKGTKFPPGESVDECLSLYLFPGLKSLKQKARFLGYMVKCLFSAYAGKRKCENRDNFRNKRIELAGELLERELRVHLAHARRTMTKAMQRHLTGDGDLKPIEHYLDASIITNGLSRAFSTGAWCHPFRKMERVSGVVANLGRANPLQSLIDLRRTRQQVLYTGRVGDARYPHPSHWGRVCFLSTPDGENCGLVKNLSLLGLVSTQIMEPVVEKLFDSGMEELVDDTSTPLSGKHKVLLNGDWVGVCSDSDYFVAELKSRRRQSELPRQMEIKLDKDDKEVRIFTDAGRLLRPLMVVENLHKLKQSKPSKYTFEHLLDQGILELIGIEEEEDCTTAWGTKQLLKQQKSYTHCELDLSFLLGVSCAIVPFANHDHGRRVLYQSQKHCQQAIGFSSTNPNIRCDTLSQQLFYPQKPLFKTMASECLQKDVLFNGQNAIVAVNVHLGFNQEDSIVMNKASLERGMFRSEQIRSYKADVDSKDSEKRKKMDEVVQFGKTHSKIGRVDSLDDDGFPFVGANMHSGDIVIGRCTESGTDHSVKLKHTERGIVQKVVLSSNDDGKNYATVSLRQVRSPCLGDKFSSMHGQKGVLGYIEEQENFAFTNQGIVPDIVINPHAFPSRQTPGQLLEAALSKGIACPMQKKKGKSDAYSKVTRHATPFSTPSVDDITDQLHRAGFSRSGNERVYNGRTGEMMRSLIFMGPNFYQRLIHMSEDKVKFRNTGPVHPLTRQPVADRKRFGGIKFGEMERDCLIAHGASANLHERLFTLSDSSQMHICRNCKSAANVIERVASSGRRIRGPYCRLCESPDYVVMVNVPYGAKLLYQELFSMGICLNFETNLC

SEQ ID NO: 158 - protein, 319 aa, A. thaliana
MDGATYQRFPKIKIRELKDDYAKFELRETDVSMANALRRVMISEVPTVAIDLVEIEVNSSVLNDEFIAHRLGLIPLTSERAMSMRFSRDCDACDGDGQCEFCSVEFRLSSKCVTDQTLDVTSRDLYSADPTVTPVDFTIDSSVSDSSEHKGIIIVKLRRGQELKLRAIARKGIGKDHAKWSPAATVTFMYEPDIIINEDMMDTLSDEEKIDLIESSPTKVFGMDPVTRQVVVVDPEAYTYDEEVIKKAEAMGKPGLIEISPKDDSFIFTVESTGAVKASQLVLNAIDLLKQKLDAVRLSDDTVEADDQFGELGAHMRGG

SEQ ID NO: 159 - protein, 319 aa, A. lyrata
MDGATYQRFPKITIRELKDDYAKFELRETDVSMANALRRVMISEVPTVAIDLVEIEVNSSVLNDEFIAHRLGLIPLTSERAMSMRFSRDCDACDGDGQCEFCSVEFRLSAKCVTDQTLDVTSRDLYSADPTVTPVDFTIDSSASDSSEQKGIIIVKLRRGQELKLRAIARKGIGKDHAKWSPAATVTFMYEPDIIINEDMMDTLSDEEKIDLIESSPTKVFGIDPVTRQVVVVDPEAYTYDEEVIKKAEAMGKPGLIEIHPKDDSFIFTVESTGAVKASQLVLNAIDILKQKLDAVRLSDDTVEADDQFGELGAHMRGG

SEQ ID NO: 160 - protein, 320 aa, C. Sativus
MEGSSYQRFPKVKIRELRDDYAKFELRDTDASMANALRRVMIAEVPTIAIDLVEIEVNSSVLNDEFIAHRLGLIPLTSERAMSMRFSRDCDACDGDGQCEFCSVEFHLRAKCHSDQTLDVTSKDLYSSDHTVVPVDFSDSAAATGEALDTKGIIIVKLRRGQELRLRAIARKGIGKDHAKWSPAATVTFMYEPSIHINEDLMETLTLEEKRTWVESCPTRVFELDTVTHQVMVVDPEAYTYDDEVIKKAEAMGKAGLVDITAREDSFIFTVESTGAIKASQLILNAIDILKQKLDAVRLSDDTVEADDQFGELGAHMRGG

SEQ ID NO: 161 - protein, 318 aa, V. Vinifera
MEGVSYQRFPKIKIREVKDDYAKFELRETDASMANALRRVMIAEVPTVAIDLVEIEVNSSVLNDEFIAHRLGLIPLTSERAMSMRFSRDCDACDGDGQCEFCSVEFHLRAKCMTDETLDVTSKDLISSDHTVVPVDFSDSSGYDSADKKGIIIVKLRRGQELRLRAIARKGIGKDHAKWSPAATVTFMYEPEIHINEDLMESLTLEEKTSWVESSPTKVFDIDASSQQVVVADAEAYTYDDEVLKKAEAMGKPGLVEIYAKEDSFIFTVESTGAIKASQLVLNAIDVLKQKLDAVRLSEDTVEADDQFGELGAHMRGG

SEQ ID NO: 162 - protein, 318 aa, M. Truncatula
MEGASYARMPRVKIRELKDDYMKFELRDTDASVANALRRVMISEVPTVAIDLVEIEVNSSVLNDEFIAHRLGLIPLTSERAMAMRFSRDCDACDGDGQCEYCSVEFHLRVKCITDQTLDVSSKDLISSDHTVTPVDVPGGDASIESDGRGIIIVKLRRGQELRLRAIARKGIGKDHAKWSPAATVTFMYEPDIHINEDLMESLTLEEKKEWVDSSPTRVFDIDPVTQQVMVVDPEAYSYDDEVIKKAEAMGKPGLIEITAKQDSFIFTVESTGAVKASQLLLNSIEILKQKLDAVRLSEDTVEADDQFGELGAHMRGG

SEQ ID NO: 163 - protein, 318 aa, R. Communis
MEGASYQRFPRIKIRELKDDYCKFELRDTDASMANALRRVMIAEVPTVAIDLVEIEVNSSVLNDEFIAHRLGLIPLTSERAMSMRFSRDCDACDGDGQCDYCSVEFHLRAKCITDQTLDVTSKDLYSSDHTVVPVDFSDSSGYDSSEQRGIIIVKLRRGQELRLRAIARKGIGKDHAKWSPAATVTFMYEPDIHINEDLMESLSLEEKQSWVESSPTKVFDIDPNTQQVVVVDPEAYTYDEEVIKKAESMGKPGLVNIQAKEDSFIFTVESTGAIKASQLVLNAIEILKQKLDAVRLSEDTVEADDQFGELGAHMRGG

SEQ ID NO: 164 - protein, 319 aa, G. max
MEGGVSYARMPRVKIRELKDDYAKFELRDTDASIANALRRVMIAEVPTVAIDLVEIEVNSSVLNDEFIAHRLGLIPLTSERAMSMRFSRDCDACDGDGQCEFCSVEFHLRVKCMTDQTLDVTSKDLYSSDPTVSPVDFSDPSATDSDNNRGIIIVKLRRGQELKLRAIARKGIGKDHAKWSPAATVTFMYEPEIHINEDLMETLTLEEKREWVDSSPTRVFEIDPVTQQVMVVDAEAYTYDDEVLKKAEAMGKPGLVEIIARQDSFIFTVESTGAVKASQLVLNAIEILKQKLDAVRLSEDTVEADDQFGELGAHMRGG

SEQ ID NO: 165 - protein, 328 aa, Z. mays
MDRPSGTSYQRFPRVRIRELKDDYAKFELRDTDASMANALRRVMIAEVPTVAIDLVEIEVNSSVLNDEFIAHRLGLIPLTSAAAMQMRFSRDCDACDGDGSCEYCSVEFHLSVHATDSDQTLEVTSNDLRSMDPKVCPVDQARAYQHALGGTDPFGANASNENRGILIVKLRRGQELRLRAIARKGIGKDHAKWSPAATVTFMYEPDIRINEELMETLTVEERISLIESSPTKVFELDSANQVVVKNAEAYTYDDEVIKHAEAIGKPGLVEITAKEDSFVFTVETTGAITAYELIMNAITVLRQKLDAVRLQDDDGDLGELGAHLGGP

SEQ ID NO: 166 - protein, 328 aa, S. Bicolor
MDRPVGASYQRFPRVRIRDLKDDYAKFELRDTDASMANALRRVMIAEVPTVAIDLVEIEVNSSVLNDEFIAHRLGLIPLTSAAAMQMRFSRDCDACDGDGSCEYCSVEFHLAARATDSDQTLEVTSNDLRSMDPKVCPVDQARAYQQALGGTDPFGANTSNENRGILIVKLRRGQELRLRAIARKGIGKDHAKWSPAATVTFMYEPDIRINEELMETLTVEERRRLIESSPTKVFKLDSANQVVVDNAEAYTYDDEVIKHAEALGKPGLVEINAKEDSFIFTVETTGAITAYELIMNAITVLRQKLDAVRLQDDDGDLGELGAHLGGP

SEQ ID NO: 167 - protein, 330 aa, O. Sativa
MERAAGGVSYQRFPRVRIRELKDDYAKFELRDTDASMANALRRVMIAEVPTVAIDLVEIEVNSSVLNDEFIAHRLGLIPLTSAAAMAMRFSRDCDACDGDGSCEYCSVEFHLAARATDSDQTLEVTSNDLRSTDPKVCPVDQARAYQHALGGTEPFDTAAAADQRGILIVKLRRGQELRLRAIARKGIGKDHAKWSPAATVTFMYEPEIRINEELMETLTLEEKRNLVESSPTKVFNIDPNTQQVVVEDAEAYTYDDEVIKKADAMGKPGLIEINAKEDSFIFTVETTGAITAYELIMNAITVLRQKLDAVRLQDDDADLGELGAHLVGG

SEQ ID NO: 168 - protein, 330 aa, B. Distachyon
MDRSAAGVSYQRFPRVRIRELKDDYAKFELRDTDASMANALRRVMIAEVPTVAIDLVEIESNSSVLNDEFIAHRLGLIPLTSSGAMGMRFSRDCDACDGDGSCEHCSVEFHLAARATDANKTLEVTSNDLRSTDPKVCPVDQAMAYQQAIGTADPYDTSTASDHRGILIVKLRRGQELRLRAIARKGIAKDHAKWSPAATVTFMYEPDIRINEELMETLTLEEKTSWVESSPTKVFDIDPNTQQVVVVDREAYTYDDEVIKKAEAMGKPGLIEISAKEDSFVFTVETTGAITAYELIINAITVLRQKLDAVRLQEEDGDFTGLDAHLGVA

SEQ ID NO: 169 - protein, 323 aa, P. trichocarpa
MESVSYQRFPKIKIREMKDDYLKFELRETDASMANALRRVMIAEVPTIAIDLVEIEVNSSVLNDEFIAHRLGLIPLTSERAMGMRFSRDCDACDGDGQCEYCSVEFHLRAKCITDQTLDVTSKDLYSSDHAVIPVDFSDPSDANDPFDHTETQRGIIIVKLRRGQELRLRAIARKGIGKDHAKWSPAATVTFMYEPEIHINEDLMETLTLEEKLSWIESSPTKVFDIDKVTQQVVVVDPEAYTYDDEVIKKAEAMGKRGLIDIRAKEDSFIFTVESTGAVKASQLVLNAIEILKQKLDAVRLSDDTVEADDQFGELGVHMRGG

SEQ ID NO: 170 - protein, 318 aa, B. Napus
MDTGATYQRFPKVKIRELKDDYAKFELRDTDVSMANALRRVMISEVPTVAIDLVEIEVNSSVLNDEFIAHRLGLIPLTSERAMSMRFSRDCDACDGDGQCEFCSVEFHLRAKCVTDQTLDVTSRDLYSADATVTPVDFGVDSSDSGEQRGIIIVKLRRGQELKLRAIARKGIGKDHAKWSPAATVTFMYEPDIIINEDMMDTLTDEEKIDLIESSPTKVFDFDSVTRQVVVVDPEAYTYDEEVIKKAEAMGKVGLIEIRPKDDSFIFTVESTGAVKASQLVLNAIDLLKQKLDAVRLSDDTVEADDQFGELGAHMRGG

SEQ ID NO: 171 - protein, 319 aa, A. thaliana
MDGVTYQRFPTVKIRELKDDYAKFELRETDVSMANALRRVMISEVPTMAIHLVKIEVNSSVLNDEFIAQRLSLIPLTSERAMSMRFCQDCEDCNGDEHCEFCSVEFPLSAKCVTDQTLDVTSRDLYSADPTVTPVDFTSNSSTSDSSEHKGIIIAKLRRGQELKLKALARKGIGKDHAKWSPAATVTYMYEPDIIINEEMMNTLTDEEKIDLIESSPTKVFGIDPVTGQVVVVDPEAYTYDEEVIKKAEAMGKPGLIEIHPKHDSFVFTVESTGALKASQLVLNAIDILKQKLDAIRLSDNTVEADDQFGELGAHMREG

SEQ ID NO: 172 - protein, 319 aa, A. lyrata
MDGTTYQRFPKINIRELKDDYAKFELRETDVSMANALRRVMISEVPTIAIDLVNIEVNSSVLNDEFIAQRLGLIPLTSERAMSMRFCQDCDACDGEGQCEFCSVEFPLSAKCVTDQTLDVTSRDLYSADPTVTPVDFTIDSSASDSSEQKGITIVKLRRGQELKLKAIARKGIGKDHAKWSPAATVTFMYEPDIIINEDLMDTLTDEEKIDLIESSPTKVFGIDPVTRQVVVVDPEAYTYDEEVIKKAEAMGKPGLIEIYPKHDSFVFTVESTGALKASQLVLNAIDILKQKLDAICLSDDTVEADDQFGELSAHMRGG

SEQ ID NO: 173 - protein, 320 aa, C. Sativus; identical to SEQ ID NO: 160

SEQ ID NO: 174 - protein, 318 aa, V. Vinifera; identical to SEQ ID NO: 161

SEQ ID NO: 175 - protein, 318 aa, M. Truncatula; identical to SEQ ID NO: 162

SEQ ID NO: 176 - protein, 318 aa, R. Communis; identical to SEQ ID NO: 163

SEQ ID NO: 177 - protein, 319 aa, G. max; identical to SEQ ID NO: 164

SEQ ID NO: 178 - protein, 328 aa, Z. mays; identical to SEQ ID NO: 165

SEQ ID NO: 179 - protein, 328 aa, S. Bicolor; identical to SEQ ID NO: 166

SEQ ID NO: 180 - protein, 320 aa, O. Sativa
MEASYQRFPTVRIRDLKDDFLKFELRDTDASIANALRRVIIAEVPTLAIDLVEIEANSSVLNDEFIAHRLGLIPLTSDKAMEMRYSRDCDECDGDGRCDYCSIEFTLSVKCTSEETLDVTSHDLQSSDSQVVPVDSIGHDPDIENFNQKKGILIVKLRKGQELKLRAIARKGIAKDHAKWSPAATVTFQYEPDIHINENLMETLSVEEKREWVDSSPTKVFEINPETQQVEVIDPEAYTYDDEVIKKAEAMGKPGLVEIYGKEDSFIFTVESTGAIKAAQMFLNAIEILRSKLDAVKLNFGSDEADEQFGDLGAHMRGGF

SEQ ID NO: 181 - protein, 330 aa, B. Distachyon; identical to SEQ ID NO: 168

SEQ ID NO: 182 - protein, 323 aa, P. trichocarpa; identical to SEQ ID NO: 169

SEQ ID NO: 183 - protein, 318 aa, B. Napus; identical to SEQ ID NO: 170

SEQ ID NO: 184 - protein, 146 aa, A. thaliana
MNAPERYERFVVPEGTKKVSYDRDTKIINAASFTVEREDHTIGNIVRMQLHRDENVLFAGYQLPHPLKYKIIVRDPKDWFRNLKVVYGCLETVNISWFKLLVLTIHTTSQSSPMQAYNQAINDLDKELDYLKNQFEAEVAKFSNQF

SEQ ID NO: 185 - protein, 116 aa, A. lyrata
MNAPDRYERFVVPEGTKKVSYDRDTKIINAASFTIEREDHTIGNIVRMQLHRDENVLFAGYQLPHPLKYKIIVRIHTTSQSSPMQAYNQAINDLDKELDYLKNQFEAEVAKFSNQF

SEQ ID NO: 186 - protein, 116 aa, C. Sativus
MNAPDRYERFVVPEGTKKVSYERDTKIINAASFTIEREEHTIGNILRMQLHRDENVLFAGYKLPHPLQYKIIVRIHTTSQSSPMQAYNQAINDLDKELDHLKNAFEAEFAKFSRDY

SEQ ID NO: 187 - protein, 129 aa, V. Vinifera
MNAPDRYERFVVPEGTKKYIVFSLLSQKLSLVSYERDTKIINAASFTVEREDHTIGNILRMQLHRDENVLFAGYKLPHPLQYKIIIRIHTTSQSSPMQAYNQAINDLDKELDYLKNAFEVELAKHSREY

SEQ ID NO: 188 - protein, 76 aa, M. Truncatula
MNAPDRYERFVVPEGTKKVSYERDTKIINAASFTIEREDHTIGNVLRMQLHKDPNVLFAGYKLPHPLQYKIISRVS

SEQ ID NO: 189 - protein, 156 aa, R. Communis
MNAPDRYERFVVPEGTKKVSYERDTKIINAASFTVEREDHTIGNILRMQLHRDENVLFAGYRLPHPLQYKIIVRIHTTSQSSPMQAYNQAINDLDKELDHLKSAFEECLRPKGTKKGSWYTSSWRVSWPSFQGIIKHAGVQGRHCGCQLTMLFDGS

SEQ ID NO: 190 - protein, 116 aa, G. max
MNAPDRYERFVVPEGTKKVSYERDTKIINAASFTIEREEHTIGNILRMQLHRDPNVLFAGYKLPHPLQYKIIVRIHTTSQSSPMQAYNQSINDLDRELDHLKSAFEAEMLKFSRDY

SEQ ID NO: 191 - protein, 112 aa, Z. mays
MNAPDRYERFVVPEGTKKVSYERDTKIVNAASFTVEREDHTVGNILRMQLHRDPNVLFAGYKLPHPLQYKIIVRIHTTSQSSPTQAYTQAINDLDKELEYLKQAFETPTDHH

SEQ ID NO: 192 - protein, 117 aa, S. Bicolor
MNAPDRYERFVVPEGTKKVSYERDTKIVNAASFTIEREDHTIGNIVRMQLHRDPNVLFAGYKLPHPLQYKIIVRIHTTSQSSPTQAYSQAVNDLDKELEYLKQAFEDEKNRFEMARL

SEQ ID NO: 193 - protein, 120 aa, O. Sativa
MNAPDRYERFVVPEGTKKVSYERDTKIVNAGSFTIEREDHTIGNILRMQLHRDPNVLFAGYKLPHPLQYKILVRVHTANQSTPTQAYTQAINDLDKELENLKQAFEDEKIRYEERPKQGY

SEQ ID NO: 194 - protein, 119 aa, B. Distachyon
MNAPDRYERFVVPEGTKKVSFEKDTKIMNAASFTIEREDHTIGNILRMQLHRDPNVLFAGYKLPHPLQYKIIVRIHTASQSSPTQAYNQAINDLDSELENLKQAFEDEKNRFEERKQPY

SEQ ID NO: 195 - protein, 116 aa, P. trichocarpa
MNAPDRYERFVVPEGTKKVSYERDTKIINAASFTVEREDHTIGNILRMQLHRDDNVLFAGYKLPHPLKYKIIVRIHTTSQSSPMQAYNQAINDLDKELDHLKNAFEAELANRPGQY

SEQ ID NO: 196 - protein, 159 aa, B. Napus
MNAPDRYERFVVPEGTKKVSYERDTKIINAASFTIEREDHTIGNIVRMQLHRDENVLFAGYQLPHPLKYKIIVRIHTTSQSSPMQAYNQAINDLDKELDFLKSQFELVENQMLLTLRLCASVLSGRGGQVLVSLLRSSEFSIGTLESHFPYSKHQPEDL

SEQ ID NO: 197 - protein, 71 aa, A. thaliana
MIIPVRCFTCGKVIGNKWDQYLDLLQLDYTEGDALDALQLVRYCCRRMLMTHVDLIEKLLNYNTLEKSDNS

SEQ ID NO: 198 - protein, 71 aa, C. Sativus
MIIPVRCFTCGKVIGNKWDTYLDLLQADYPEGEALDMLGLVRYCCRRMLMTHVDLIEKLLNYNTMDKSEII

SEQ ID NO: 199 - protein, 71 aa, V. Vinifera
MIIPVRCFTCGKVIGNKWDTYLDLLQADYTEGDALDALGLVRYCCRRMLMTHVDLIEKLLNYNTLEKSETS

SEQ ID NO: 200 - protein, 71 aa, M. truncatula
MIIPVRCFTCGKVIGNKWDSYLDFLQADYTEGDALDALGLVRYCCRRMLMTHVDLIEKLLNYNTMEKHEAN

SEQ ID NO: 201 - protein, 76 aa, R. Communis
MIIPVRCFTCGKVIGNKWDTYLDLLQADYSEGDALDALGLVRYCCRRMLMTHVDLIEKLLNYNKYPFAALERSEGS

SEQ ID NO: 202 - protein, 71 aa, G. max
MIIPVRCFTCGKVIGNKWDTYLDLLQSDYSEGDALDALGLVRYCCRRMLMTHVDLIEKLLNYNTLDKSDPS

SEQ ID NO: 203 - protein, 71 aa, Z. mays
MIIPVRCFTCGKVIGNKWDLYLDLLQADYSEGDALDALELFRYCCRRMLMTHVDLIEKLLNYNTLEKTETS

SEQ ID NO: 204 - protein, 73 aa, S. Bicolor
MIIPVRCFTCGKVIGDKWDAYLELVQADYDEEDALTALNLNRYCCRRMLMTHVDLIEKLLNYNTLEKTTGTDS

SEQ ID NO: 205 - protein, 72 aa, O. Sativa
MIIPVRCFTCGKVIGNKWDLYLDLLQADYTEGDALDALGLVRYCCRRMLMTHVDLIEKLLNYNTLEKTETAG

SEQ ID NO: 206 - protein, 71 aa, B. Distachyon
MIIPVRCFTCGKVIGNKWDHYLDLLQADYTEGDALDALGLVRYCCRRMLMTHVDLIEKLLNYNTLEKTEAT

SEQ ID NO: 207 - protein, 74 aa, P. trichocarpa
MIIPVRCFTCGNCGKVIGNKWDTYLDLLQADYTEGDALDALGLVRYCCRRMLMTHVDLIEKLLNYNTLEKSEGS

SEQ ID NO: 208 - protein, 103 aa, B. Napus
MIIPVRCFTCGKVIGNKWDTYLDLLQADYTEGESLYDGFSGCYWCFDSVVCISSLIFIPLCVKLDALDAIGLVRYCCRRMLMTHVDLIEKLLNYNTLEKSDAN

SEQ ID NO: 209 - protein, 51 aa, A. thaliana
MDPAPEPVTYVCGDCGQENTLKSGDVIQCRECGYRILYKKRTRRVVQYEAR

SEQ ID NO: 210 - protein, 52 aa, A. lyrata
MEPAQPEPVTYVCGDCGQENTLKPGDVIQCRECGYRILYKKRTRRVVQYEAR

SEQ ID NO: 211 - protein, 51 aa, C. Sativus
MDPQPEPVSYICGDCGMENTLKQGDVIQCRECGYRILYKKRTRRIVQYEAR

SEQ ID NO: 212 - protein, 51 aa, V. Vinifera
MDPQPEPVSYICGDCGQENTLKPGDVIQCRECGYRILYKKRTRRIVQYEAR

SEQ ID NO: 213 - protein, 51 aa, M. Truncatula
MDPLPEPVSYLCGDCGVENTLKSGDVIQCRDCGYRILYKKRTRRIVQYEAR

SEQ ID NO: 214 - protein, 51 aa, R. Communis
MDPQPEPVSYICGDCGMENTLKQGDVIQCRECGYRILYKKRTRRSSELSRM

SEQ ID NO: 215 - protein, 51 aa, G. max
MDPQPEPVSYICGDCGMENTLKPGDVIQCRECGYRILYKKRTRRIVQYEAR

SEQ ID NO: 216 - protein, 52 aa, Z. mays
MDPQQPEPVSYLCGDCGAENTLKPGDVIQWRECGYRILYKKRTRRIVQYEAR

SEQ ID NO: 217 - protein, 52 aa, O. Sativa
MDPQQPEPVSYLCGDCGAENTLKPGDVIQCRECGYRILYKKRTRRIVQYEAR

SEQ ID NO: 218 - protein, 52 aa, B. Distachyon
MDPQQPEPVSYLCGDCGAENTLKSGDVIQCRECGYRILYKKRTRRIVQYEAR

SEQ ID NO: 219 - protein, 62 aa, P. trichocarpa
CGMENTLKPGDVIQCRECGYRILYKKRTRRIVFNLRVLVRVVKLRSFGSLMWSHCCLVVSAS

SEQ ID NO: 220 - protein, 104 aa, B. Napus
MNLLRPFNVSLSLSLSLSLSLSLVSSLVFETIARINPNSAETLALSGKIRVDRMDQQPEPVTYVCGDCGQENTLKSGDVIQCRECGYRILYKKRTRRVVQYEAR

SEQ ID NO: 221 - protein, 144 aa, A. thaliana
MADDDYNEVDDLGYEDEPAEPEIEEGVEEDADIKENDDVNVDPLETEDKVETEPVQRPRKTSKFMTKYERARILGTRALQISMNAPVMVELEGETDPLEIAMKELRQRKIPFTIRRYLPDMSYEEWGVDELIVEDSWKRQVGGD

SEQ ID NO: 222 - protein, 144 aa, A. lyrata
MADEDYNEVDDLGYEDEPVEPEIEEGVEEDADIKENDDVNGEPMETEDKVETEPVQRPRKTSKFMTKYERARILGTRALQISMNAPVMVELEGETDPLEIAMKELRQRKIPFTIRRYLPDGSFEEWGVDELIVEDSWKRQVGGD

SEQ ID NO: 223 - protein, 142 aa, C. Sativus
MADDDYNDLDMGYEDEPPEPEIEEGAEEELDTNTDDVPGEPVEAEGKEDEEPVERVRKTSKFMTKYERARILGTRALQISMNAPVMVELEGETDPLEIAMKELRERKIPFTIRRYLPDGSYEDWGVDELIVEDSWKRQVGGA

SEQ ID NO: 224 - protein, 141 aa, V. Vinifera
MADDDYNDMDMGYEDEPPEPEIEEGAEEDADNNNNEDIPDAIETAEKEQVPVERSRKTSKYMTKYERARILGTRALQISMNAPVMVELEGETDPLEIAMKELRERKIPFTIRRYLPDGSYEDWGVDELIVEDSWKRQVGGD

SEQ ID NO: 225 - protein, 145 aa, M. Truncatula
MADDDYEDIDMGYEEEPPEPEIEEGAEEEDPDNKNDDLDAEGEPIETEEKEDAAPVERPRRTSKYMTKYERARILGTRALQISMNAPVMVELEGETDPLEIAMKELRERKIPFTIRRYLPDGSYEDWGVDELIVEDSWKRQVGGD

SEQ ID NO: 226 - protein, 124 aa, R. Communis
MIWQEGAEEDVENNNNEDVPGDPIETEDKEEQEAAERPRKTSKYMTKYERARILGTRALQISMNAPVMVELEGETDPLEIAMKELRERKIPFTIRRYLPDGSYEDWGVDELIVEDSWKRQVGGD

SEQ ID NO: 227 - protein, 142 aa, G. max
MADDDYEDIDMGYEDEPPEPEIEEGAEEDLENKNDELTGEPIDTEDKEEEQPVERPRKTSKYMTKYERARILGTRALQISMNAPVMVELEGETDPLEIAMKELRERKIPFTIRRYLPDGSYEDWGVDELIVEDSWKRQVGGD

SEQ ID NO: 228 - protein, 142 aa, Z. mays
MADDDYNEIDMGYEDEPPEPEIEEGAEEELENNEDAPDDVIGGEGEDKEQEKTKRERKTTKYMTKYERARILGTRALQISMNAPVMVELEGETDPLEIAMKELRARKIPFTIRRYLPDGSYEDWGVDELIVEDSWKRQVGGD

SEQ ID NO: 229 - protein, 143 aa, S. Bicolor
MADDDYNEMDMGYEDEPPEAEIEEGAEEELENNNEDTPDDVVGAEAEDKEQEKIARARKTTKYMTKYERARILGTRALQISMNAPVMVELEGETDPLEIAMKELRARKIPFTIRRYLPDGSYEDWSVDELIVEDSWKRQVGGE

SEQ ID NO: 230 - protein, 142 aa, O. Sativa
MADDDYNDMDMGYEDEPPEPEIEEGAEEEPENNEDGPDEVVGAEAEDKEQEKTQRPRKTSKYMTKYERARILGTRALQISMNAPVMVELEGETDPLEIAMKELRARKIPFTIRRYLPDGSYEDWGVDELIVEDSWKRQVGGG

SEQ ID NO: 231 - protein, 142 aa, B. Distachyon
MADDDYNEVDMGYEDEPAEPDIEEGVEEDPENNEDAPEDVVGGEGEEKEQEKTPRPRNTSKYMTKYERARILGTRALQISMNAPVMVELEGETDPLEIAMKELRARKIPFTIRRYLPDGSYEDWGVDELIVEDSWKRQVGGG

SEQ ID NO: 232 - protein, 143 aa, P. trichocarpa
MADDEYNDVDMGYEDEPAEPEIEEGADEDAENNNNEDDTGEPIETEDKEEQAPVERPRKTSKFMTKYERARILGTRALQISMNAPVMVELEGETDPLEIAMKELRERKIPFTIRRYLPDGSYEDWGVDELIVEDSWKRQVGGD

SEQ ID NO: 233 - protein, 144 aa, B. Napus
MAEDDYNEVDDLGYEDEPAEPEIEEGIEEDADMKDNDDINGEPLETEDKVETEPVQRPRKTSKFMTKYERARILGTRALQISMNAPVMVELEGETDPLEIAMKELRQRKIPFTIRRYLPDGSFEEWGVDELIVEDSWKRQVGGD

SEQ ID NO: 234 - protein, 144 aa, A. thaliana; identical to SEQ ID NO: 221

SEQ ID NO: 235 - protein, 144 aa, A. lyrata; identical to SEQ ID NO: 222

SEQ ID NO: 236 - protein, 143 aa, C. Sativus
MADDDYNDLDMGYEDEPPEPEIEEGAEEELENNNNDDIPGEPVEAEEKEDEEPIVRARKTSKFMTKYERARILGTRALQISMNAPVMVELEGETDPLEIAMKELRERKIPFTIRRYLPDGSYEDWGVDELIVEDSWKRQVGGA

SEQ ID NO: 237 - protein, 140 aa, V. Vinifera
MNVYQRSLRKKCNKVRTAYTFDEGAEEDADNNNNEDIPDAIETAEKEQVPVERSRKTSKYMTKYERARILGTRALQISMNAPVMVELEGETDPLEIAMKELRERKIPFTIRRYLPDGSYEDWGVDELIVEDSWKRQVGGD

SEQ ID NO: 238 - protein, 144 aa, M. Truncatula
MADDDYNDLDIGYEDEPPEPGIEEGAEVDADDNDNNDEMAGEPIETEEKEQEEPTERPRKTSKYMTKYERARILGTRALQISMNAPVMVELEGETDPLEIAMKELREKKIPFTIRRYLPDGSYEDWGVDELIVEDSWKRQVGGD

SEQ ID NO: 239 - protein, 124 aa, R. Communis; identical to SEQ ID NO: 226

SEQ ID NO: 240 - protein, 142 aa, G. max; identical to SEQ ID NO: 227

SEQ ID NO: 241 - protein, 142 aa, Z. mays
MADDDYNEIDMGYEDEPPEPEIEEGAEEEPENNEDAPDDVIGGEGEDKEQEKTKRERKTTKYMTKYERARILGTRALQISMNAPVMVELEGETDPLEIAMKELRARKIPFTIRRYLPDGSYEDWGVDELIVEDSWKRQVGGD

SEQ ID NO: 242 - protein, 143 aa, S. Bicolor; identical to SEQ ID NO: 229

SEQ ID NO: 243 - protein, 142 aa, O. Sativa; identical to SEQ ID NO: 230

SEQ ID NO: 244 - protein, 142 aa, B. Distachyon; identical to SEQ ID NO: 231

SEQ ID NO: 245 - protein, 143 aa, P. trichocarpa; identical to SEQ ID NO: 232

SEQ ID NO: 246 - protein, 144 aa, B. Napus; identical to SEQ ID NO: 233

SEQ ID NO: 247 - protein, 146 aa, A. thaliana
MASNIILFEDIFVVDQLDPDGKKFDKVTRVQATSHNLEMFMHLDVNTEVYPLAVGDKFTLALAPTLNLDGTPDTGYFTPGAKKTLADKYEYIMHGKLYKISERDGKTPKAELYVSFGGLLMLLKGDPAHISHFELDQRLFLLMRKL

SEQ ID NO: 248 - protein, 146 aa, A. lyrata
MASNIILFEDIFVVDKLDPDGKKFDKVTRVQATSHNLEMFMHLDVNTEVYPLAVGDKFTLALAPTLNLDGTPDTGYFTPGAKKTLADKYEYIMHGKLYKISERDGKTPKAELYVSFGGLLMLLKGDPAHISHFELDQRLFLLMRKL

SEQ ID NO: 249 - protein, 146 aa, C. Sativus
MAGLLFNDIFKVKCVNPDGKKYDKVSRIEARSEKLSMHMLLDVNTEIYPIDEGEKLLMVLSPTLNYDGSPVTSYKDQEGKKSLADKFEYIMHGKTYKLSDEGSGSDLKVEVYASFGGLQMLLKGDPIHCAKFRVDQNMFLLLRKLT

SEQ ID NO: 250 - protein, 305 aa, V. Vinifera
  VARIANT 86, 160, 170, 181, 268: Xaa = Any Amino Acid
MENTLFGDIFKVIQIDPDGKKFDKVSRIEAQSEQLDMYMQLDVNTEIYPMHAGEKFAMSLASTLDLDGTPDTGYYTQVKCCGMVVXLARTKRITAAVRVAGRKSLADKFEYVMHGKLYKISEEGSGPNVKGVIYVSFGGLLMMLSGDPANTAKLDLDQRXFLLIRKFKDXTLIPSCEYLLXRDNFAVTMVETFFDDIFVVDGQDPGGKKFDKVSRIEASSEQYDMFMQLDVNIEAYPIQAGEKFRMVLAPTLHLDGADVTDYFTQGEXKSLADKFDYVMYGIIYKVSNEGSGPDVKGYISILFRH

SEQ ID NO: 251 - protein, 145 aa, M. Truncatula
MVESLLEDIFRVEKVNPDDKKLFEKVTRIEARSEKFDMFMQLDINSELYPLKMGQKFSLALVPTLNPDGTPDTGYYNPGNRQSIADNYEYVMYGKLYRVTEGSGGREKAELNISFGGLLMLLKGDHSHFNKFELDQRLYLLMRKV

SEQ ID NO: 252 - protein, 146 aa, R. Communis
MSNIVLFEDIFVVDKLDPDGKKFDKVSRIEAHSQNCDMFMHLDVNTEIYPMAVGDKFTMALAHTLNLDGTPDTGYYTQGARKTLADKYEYIMNGKLYKISEEGSGKAVKAEMLVSYGGLLMLLRGDPSHVSHFELDQRLFLLMRKL

SEQ ID NO: 253 - protein, 145 aa, G. max
MVENNLFEDIFRVEKLNPDDKKLFDKVTRIEARSEKFDMFMHLDINSEIYPLKVGQKFALVLVSTLNPDGTPDTGYYTQISRQSLANNFEYVMYGKLYRITEGSGREKAEMNISFGGLLMMLKGDTSHCNKFELDQRLYLLIRKV

SEQ ID NO: 254 - protein, 146 aa, Z. mays
MSEHLFEDTFVVTRLDPDGKKFDRVSRVEARSEQLDMYMQLDVATDVYPMHAGEKFNMVIAPTLNLDGTPDTGYYTQAGRKTLADNYEYVMQGKLYKISEDTSSSQNAKVEMYASFGGLLMLLRGDPSTAASFELDQRLFLLIRKV

SEQ ID NO: 255 - protein, 145 aa, S. Bicolor
MSEHLFEDTFIVSRLDPDGKKFDKVSRVEARSEQLGMYMQLDVATDVYPLRAGEKFNMVLAPTLNLDGTPDTGYYTQAGRKTLADNYEYVMQGKLYKISEDTSSQNAKVEIYASFGGLLMLLRGDPSTAASFELDQRLFLLMRKV

SEQ ID NO: 256 - protein, 148 aa, O. Sativa
MAEFLFEDIFTVTRLDPDGKKFDRVSRIEARSDQFDMYMQLDVATDVYPMHPGDRFTMVLVPTLNLDGTPDSAFFTQAGRKTLADKYEYVMHGKLYKISEDKDTSDQNAKKVEMYASFGGLLVMLKGDPSSAANFELDQRLFLLMRKV

SEQ ID NO: 257 - protein, 116 aa, B. Distachyon
MAEHLFEDIFVVNRIDPDGKKFDRVNRIEARSEQFHMYMQLDVATYVYPMHAGDKFTMVLAPTLNLDGTPDTGYYTQAGRKTLADKYDYVMHGKLYKISEDSSGGQAAKVYDFSKL

SEQ ID NO: 258 - protein, 148 aa, P. trichocarpa
MSSSNIIMFEDIFVVDKLDPDGKKFDNVTRIEAHSQNCDMFMHLDVNTDVYPMFVNDKFTMALAHTLNLDGTPDTGYYTQGGRKTLADKYEYVMHGKLYQIQEEGSRRATRTEMVITFGGLLMLLKGDPSYVSQFELDQRLFCLIRKL

SEQ ID NO: 259 - protein, 146 aa, B. Rapa
MASSIIMFEDIFVVDKLDPDGKKFDKVTRIEATSHNLDMFMHLDVNTEVYPMAVGDKFTLAMAPTLNLDGTPDTGYFTPGAKKTLADKYEYVMHGKLYKITERDGQTPKAEMYVSFGGLLMLLRGDPAHISHFELDQRLFLLMRKL

SEQ ID NO: 260 - protein, 146 aa, A. thaliana
MASNIIMFEDIFVVDKLDPDGKKFDKVTRVEARSHNLEMFMHLDVNTEVYPLAVGDKFTLAMAPTLNLDGTPDTGYFTPGAKKTLADKYEYIMHGKLYKISERDGKTPKAELYVSFGGLLMLLQGDPAHISHFELDQRLFLLMRKL

SEQ ID NO: 261 - protein, 146 aa, A. lyrata; identical to SEQ ID NO: 248

SEQ ID NO: 262 - protein, 146 aa, C. Sativus; identical to SEQ ID NO: 249

SEQ ID NO: 263 - protein, 145 aa, V. Vinifera
MENTLFGDIFKVIQIDPDGKKFDKVSRIEAQSEQLDMYMQLDVNTEIYPMHAGEKFAMSLASTLDLDGTPDTGYYTQAGRKSLADKFEYVMHGKLYKISEEGSGPNVKGVIYVSFGGLLMMLSGDPANTAKLDLDQRVFLLIRKV

SEQ ID NO: 264 - protein, 145 aa, M. Truncatula; identical to SEQ ID NO: 251

SEQ ID NO: 265 - protein, 146 aa, R. Communis; identical to SEQ ID NO: 252

SEQ ID NO: 266 - protein, 145 aa, G. max; identical to SEQ ID NO: 253

SEQ ID NO: 267 - protein, 146 aa, Z. mays; identical to SEQ ID NO: 254

SEQ ID NO: 268 - protein, 145 aa, S. Bicolor; identical to SEQ ID NO: 255

SEQ ID NO: 269 - protein, 148 aa, O. Sativa; identical to SEQ ID NO: 256

SEQ ID NO: 270 - protein, 144 aa, B. Distachyon
MAEHLFEDIFVVSRIDPDGKKFDRVNRIEARSEQMYMQLDVATDVYPMHAGDKFTMVLAPTLNLDGTPDTGYYTQAGRKTLADKYDYVMHGKLYKISEDSSGGQAAKVEIYASFGGLLMLLKGDPSSAANLELDQRLFLLMRKV

SEQ ID NO: 271 - protein, 148 aa, P. trichocarpa; identical to SEQ ID NO: 258

SEQ ID NO: 272 - protein, 146 aa, B. Rapa; identical to SEQ ID NO: 259

SEQ ID NO: 273 - protein, 222 aa, A. thaliana
MEVKGKETASVLCLSKYVDLSSEESHRYYLARRNGLQMLRDRGYEVSDEDINLSLHDFRTVYGERPDVDRLRISALHRSDSTKKVKIVFFGTSMVKVNAIRSVVADILSQETITGLILVLQNHVTNQALKAIELFSFKVEIFQITDLLVNITKHSLKPQHQVLNDEEKTTLLKKFSIEEKQLPRISKKDAIVRYYGLEKGQVVKVNYRGELTESHVAFRCVW

SEQ ID NO: 274 - protein, 222 aa, A. lyrata
MEVKGKETAPSLCLSKYVDPSSEESHRYYLARQNALQMLRDRGYQVSDEDINLSLHDFRAVYGERPDVDRLRISAQHRSDSSKKVKVVFFGTGMVKVNAIRSIAADVLSQETVTGLILVLQSQVTKQAMKAIELFSFKVEIFQITDLLVNITKHALKPQHRVLNDKEKTTLLKKFSIEEKQLPRISKKDAIVRYYGLEKGQVVKVNYRGELTESHVAYRCVW

SEQ ID NO: 275 - protein, 227 aa, C. Sativus
MEEDGFEAEPNPVEFGTCLSSYIDDGTTESHRYFLSRRTVVEMLKDRGYTINSPNIDFSLQQFRETFGQFPDVDRLKLSAAHHSDPSKRVLVVFCGTGAVKVNAIRNIAGQIANKDSLHGLILIVQNQITNQAMKAVELFSFKVEIFQITDLLVNITKHALKPNHQVLTEEEKQKLLKQYSIEEKQLPRMLRTDAIARYYGLEKGQVVKVTYDGDMTRAHITYRCVW

SEQ ID NO: 276 - protein, 229 aa, V vinifera
MDGGGWFDGDLNGDFEVKRCLSSFVDEGRIESHRYYLARRTLLEMLRDRGYSIPALDIDISLQDFRSFYSQKPDPDRLRISAALRSDPSKKILVIFCGPDVVKVNAIRSIATQIVNKDSLSKLILVLQNHITSQALKAVDLFSFQVEKFQITDLLVNITKHVLKPKHRVLTDQEKNKLLKKYSLNEKQLPRMLQQDAIARYYGLEKGQVVKVIYNGEITGSHVTYRCVW

SEQ ID NO: 277 - protein, 248 aa, M. Truncatula
MATENGGGQNGTTETAITTMEIENGDITTQPQLQEQPQCLFTKKDNGSIESHRYYLSRRTVLEMLKDRGYSIPSDEIQLSLDDFRQIHGQSPDVDRLRLTATHATNPSKRILVVFSGPGIVKVNGVRDIAGQIVNRESLTGLILIVQNQITSQALKAVNLLSFKVEIFQITDLLVNATKHVLKPKHQVLTDKQKKNLLKKYDIQEKQLPRMLQTDAIARYYGLQRGQVVKVTYTGEITQMHVTYRCVW

SEQ ID NO: 278 - protein, 239 aa, R. Communis
MATGADYLCLNGGGGGGGGGGDDRRGRVECLTKFVEQASLESQRYYLSRKTVMEMLRDRGYDVADSELTGSFTEFLSEFGDNPDILKLRISASLHSHPDKKMVVVFMGTEEIKLANIRGLLCQIKNKESLNGLILILQSKMNHYARKELGQFPSKVEIFHISDLLVNITKHVLKPRHEVLTAEQKQQLLNKFSSEDKQLPRMLVTDAISRYYGFEKGQVVKITYSGGLVDSLVTYRCVT

SEQ ID NO: 279 - protein, 237 aa, G. max
MAATEIGLLEWVRVGGEEEEEAEQAKGCLSKFVDNGSVESHRYYLSRRTTLEMLKDRGYSIPSHEIDLSLSDFRDIHGQFPDPDRLRLSLTHATNSSKRILVIFCGPGVVKVTAIRNTAGQIINRDTLTGLILIVENHITSQALKAVNLFSFKVEIFQITDLLVNITKHVLKPKHQVLTDKQKINLLKKYNIEEKQLPRMLQTDAIARYYGLERGQVVKVTYSGEVTQMHVTYRCVW

SEQ ID NO: 280 - protein, 264 aa, Z. mays
MDPHQFAPSQQSALTMESAEITAAAAAARAPNGAARAIVEDDDEDDDVPEVAACISTMLDRGGSVESHRLFLARRTALEMLRDRGYAVPEEELARTLPEFRAWWEYRPELERLAFSTTLASDPSSKVKVVFCPPGPVKIAAIRLIYTEVKDENLSRLILILQGKIMSTTRESIKEIFRFKVDTFQITELLVNITKHVLKPKHEVLTAEGKAKLLKEYNVVDSQLPRMLENDAVARYYGLGKGTVVKVIYDSELTGNHVTYRCIT

SEQ ID NO: 281 - protein, 263 aa, S. Bicolor
MDLNQFVPSQNSALTMDSAESTAAAAARAPNGAARAVDDYDDDDDAVPEVAACISAMLDLGGSVESKRLFLARRTALEMLRDRGYAVPEDELARTLPEFRAWWEDKPELERLAFSTTLASDPSSKVKVVFCPPEPVKIAAIRVVYTGVKDENLSRLILILQGRIMSKAREAIKEIFPYKVDTFQITELLVNITKHALKPKHQVLTAEEKAKLLKEYNVVDSQLPRMLENDAVARYYGLGKGTVVKVIYDSELTGNHVTYRCIF

SEQ ID NO: 282 - protein, 227 aa, O. Sativa
MAAEMEVDDVDVHEVPECIASMIDRGSVESHRLFLARRTAMEMLRDRGYSVPEAEIARTLPEFRAWWAEKPGIERLAFTTTLVSDPSKKVQLVFCPPEPVKIATIREIYLQTKEENLSRLVLILQSKILSRAREAIKEIFKFKVDIFQATDLLVNITKHVLKPKHEVLSADQKAKLLKEYNVEDSQLPRMLETDAVARYYGFDKGTVVKVTYDGELTGKRVAYRCVF

SEQ ID NO: 283 - protein, 255 aa, B. Distachyon
MDSAESSVASTPARAPAVAPKAAVGPRYNNDGGDDDDDGVPMVARCVSSMIDSGDPESHRLFLARRTALEMLRDRRYAVPEADLARTLPEFRAWWAERPEIDRLSFSTTLASDPSNKVQLVFCPPEPFKIAAIREVYGRVKDENLSCLILVLQSKITSRAKDAIKEIFKYKVDVFQIAELLVNVTKHVLKPEHEVLTPEEKAHLLKKYNVVDSQLPRMLETDAIARYYGLGKGTVLRVTYDGELTGNHVTYRCIF

SEQ ID NO: 284 - protein, 243 aa, P. trichocarpa
MEQNLLTERPNEEEGGAHQEKENGSFGMESLGRCLSSFVDEGSTESHRYYLSRRTVLEMLKDRGYSVPSSEIDISLQDFRGVYGQNPDIELLKFSATHKSDPSKRMLVIFCGLGVVKVGMIRLITVQITDRDSLTGLILVLQNNITNQAMKALDLFKFKIEIFQITDLLVNITKHILKPKHQVLSEQAKQRLLKKYSIEEKQLPRLLKKDAISRYYGLERGQVVKVTYDGDITGSHVTYRCVW

SEQ ID NO: 285 - protein, 230 aa, B. napus
MEGIGNDKSSCSSSSTVPGPCLSKYVDPSSEESHRYYLARRNALEMLRDRGYEVSLEDTNLSLQDFRTVYGERPDVDRLRISAHHRSDSSNKVKVVFFGTSKVKVNTIRSVAAEILSQETITGLILVLQNQVTDKALKAIELFTFKVEIFQITDLLVNLTKHVLSLRHRVLTDGEKKALLKHFNIEEKQLPRISKKDAVVRYYGLEKGQVVKVSYRGELTESYVAYRCVW

SEQ ID NO: 286 - protein, 205 aa, A. thaliana
MSEKGGKGLKSSLKSKDGGKDGSSTKLKKGRKIHFDQRTPPANYKILNVSSDQQPFQSSAAKCGKSDKPTKSSKNSLHSFELKDLPENAECMMDCEAFQILDGIKGQLVGLSEDPSIKIPVSYDRALAYVESCVHYTNPQSVRKVLEPLKTYGISDGEMCVIANASSESVDEVLAFIPSLKTKKEVINQPLQDALEELSKLKKSE

SEQ ID NO: 287 - protein, 210 aa, A. lyrata
MSEKGGKGLKSSLKSKDGFLVAGGKDGNSTKLKKGRKIHFDQGTPPPNYKILNGSSDPLPFQSSAAKVGKGDKPTKSSKNSLQSFELKDLPENAECMMDCEAFQILDGIKGHLVGLSEDPSIKIPVSYDRALAYVDSCVHYSNPQSVRKVLEPLKTHGVSDGEMCVIANASPDTVDEVLAFIPSLKAKKEVINQPLQDALVELAKLKKSG

SEQ ID NO: 288 - protein, 220 aa, C. Sativus
MSEKGEKGFSVQKRPAKSSLKSSALKDASLKGKDDSLSKLKKGRKVQFDAQGSVDATNTFSMKYSGKNGDLGKGGKGANTKASIAKEPQALELKIEQELPKNVKCQCLMDCEAAQLLQGIQDQMVFLSADPTIKIPTSFDRGLQYAKRANHYVNAESVRPVLETLKKYGVTDSEICVIANVCPDTTDEVFALLPSLKRKRSKLSEPINNVLSELAKVKSS

SEQ ID NO: 289 - protein, 235 aa, V. Vinifera
MGEKGGKGFSLNSNLGKSSTKSPLEGKDDSAAKSKRGRKVQFNNGGLPEARLTSSLMSGGKTDIPIAKGDLSKGGKGGRVLNGEKSAVPKPPAPLELRIEQELPKNAKCMMDCEAALILKGIQEQMVVLSEDPTIKIPLSFNKGLQYAQSSNCYASPQSVRLVLEPLSKYGVSDGEICVIANTCPETIDEVFALVPSLKPKWSTLREPLKDVLRGLAELKHSNQSSNPERSPGFS

SEQ ID NO: 290 - protein, 201 aa, M. Truncatula
MSDKGGKGGSLLSKGGLKGKDDSATKSAKARKVQFSEGLFESRSNGPTSGGKGDKVANGGKSSAAKDPHQFEHRVDQELPENFKCLMDCEAAVMLQGIQDQMVALSRDPSIKMPASFDKGLYYAKSSSSSKYSNPESVRHTLEPLMNHDLTESEICVIANVCPETADEVFALLPSLKSKRGINSQPVEEALSELAKFKQMI

SEQ ID NO: 291 - protein, 203 aa, R. Communis
MEKGGKGFSLPGKGLKSSLKSITPASTKGKDDTSAKSKRGKKVQFNSQGNMSKGGKGDKVSNGVKISSTKEPQPLELKIEQDLPKNAKCLMDCEAAQVLQGIQEQMVLLSRDPTIKLPVSFDRALQHARTGARFTNPQSVRRILEGLKKHGVSEGEICTIANVCPDGVDEVFALVPSLKSKKNVLREPLKDILGQLSELKQQA

SEQ ID NO: 292 - protein, 211 aa, G. max
MEKGGKGASLFSKGGLGSLKGKDDIATKSAKGRRVQFSTDGPLFESGVSSNSATSLKSGGKGGMGDNVAKGGKNSQSKDSHPSDYRVDQKLPENIKCLMDCEAVDILQGIQERMVMLSRDSTVKMPISFDKGLQYAKSNSKYLDLQSIRHILDRLAKCGVTDSEICVIGNVCPETIDEVFALLPSLKDRRNIDSQVLKDSLSELAKFRQTM

SEQ ID NO: 293 - protein, 219 aa, Z. mays
MDQVPNGRHKVSFAKPRVVVLSDSDSDSEGFVEELTPVHSKSNGKASSASLKTGGKASALSKGEASKGKAYSSDKGGKGSSSHAVPTKSDAELKLELDIPPNSRMLMNCEAAELLQEIHEHMAILSEDPKIKIPESFDKAFQYSKDGNHFTTASSVKQAIEPLKKCGVSDGEICMIANIGPETVEEVYALVPSLKANRSAIEGSVTEVLTALANIKAAK

SEQ ID NO: 294 - protein, 143 aa, S. Bicolor
MSGEEEENAAELKIGEEFLKAKCLMNCEVAIILEHKYEQIQQHSSESDPSSQVSQVFEKSLQYVKRFSRYKNPDAVRQVRETLSRYGLAEFELCTLGNLCPDTSGEATALVPSLKSGGRFVGDARDEKIEKMLNDLSLIKKFE

SEQ ID NO: 295 - protein, 239 aa, Oryza sativa
MAERGSRGFSAASKGKAIASKKDLPMNVFTGSLRQNSSANIPHVNIDSDSDSEGFVEELPRVNSKTNGKAASESLKTGGKASSKGQTGKGGNAGKGGKGSASARVSAKSDAELKLELDMPPNSCILMNCEVAELLQEIHEHMAILSEDPKIKIPESFDKAFQYVKEGNQFSTAQSVKQVLDPLRKYGVSDGEMCLIANVGPETIEEVYALVPSLKATRSLNESPIMEALTALADIKAAK

SEQ ID NO: 296 - protein, 238 aa, B. Distachyon
MSDRGGKGYYTAPRGKALASKTGTPNGRQNISANAPIVLSDSDSDSEGFREEPTPTHSKSNGKASSDSLKTGGKASSFSNGEAGKGGKTFSAGKGGKGSASTAMPAKSDAELKLELDMPSNSRILMNCEATELLQQIHEHMAILSEDPKIKIPESFDRTFQFAKEGNHFTSAKSVKEVLDPLKKSGVTDGEICMIANIGPETIEEVYALVPSLKATRSLNEDLITEALTALANIKAPK

SEQ ID NO: 297 - protein, 197 aa, P. trichocarpa
MEKGGGKGFSLPSKEPKSSLKSSSTKGKDDSNNGRKIHFESEGNLSKGGKGGKIANGGKSPMTKEPPPLELKIESELPQNAKPLMDCEAAQILQGIQDQMVLLSQDPTIKLPVSFDKGLQYAKNGAHYTNPQSVRRVLEALRKYGVSDGEISLIANVFPETADEAFALVPSLKSKASTLREPLKDILGELAKFKQPA

SEQ ID NO: 298 - protein, 209 aa, B. Napus
MSEKGGKGFKSSLKSSYGSGKDDNATKSKKTRKVQFDPQGPRESKYTFLQESDDQIQGSSAKGGKGSKARKSTLSKESQPLELKTDKELPENAKCLMDCEAFEILQGIKEQMAVLSEDPSVKLPVSFDRGLEYVKYGRCYMNPQSVRQILEPLKKHGVSESEMCVIANVCPESIDEVFAFVPSMKGRKDKISEPLEEALMKLSKLKRSA

SEQ ID NO: 299 - protein, 178 aa, A. thaliana
MFLKVQLPWNVMIPAENMDAKGLMLKRAILVELLEAFASKKATKELGYYVAVTTLDKIGEGKIREHTGEVLFPVMFSGMTFKIFKGEIIHGVVHKVLKHGVFMRCGPIENVYLSYTKMPDYKYIPGENPIFMNEKTSRIQVETTVRVVVIGIKWMEVEREFQALASLEGDYLGPLSEE

SEQ ID NO: 300 - protein, 178 aa, A. lyrata
MFLKVQLPWNVMIPAENMDAKGLILKRAILVELLDAFASKKATKELGYYVAVTTLDKIGEGKIREHTGEVLFPVMFSGMTFKIFKGEIIHGVVHKVLKHGVFMRCGPIENVYLSYTKMPDYKYVPGENPIFMNEKTSRIQVETTVRVVVIGIKWMEAEREFQALASLEGDYLGPLSEE

SEQ ID NO: 301 - protein, 175 aa, C. Sativus
MFLKVQLPWNVIIPAENLDAKGLMLQRSIIIRLLDEFATKKATKDLGYFLAVTTLENIGEGKVRQTGDVLFPVIFSGITFKLYRGEILEGVVHKVLKHGVFLRCGPVENIYLSYLKMPDYRYVPGENPVFLNDKLSKIEKDVVVRFIVIGTKWLEAEREFQALVSLEGDYLGPVS

SEQ ID NO: 302 - protein, 177 aa, V. Vinifera
MFLKVQLPWNVIIPAECLDAKGLMLQRSIIIRLLDAFSNKKATQELGYFLAVTTLENIGEGKVRQHSGDVLFPVVFSCVTFKLFRGEILDGVVHKVLKHGVILRCGPVENIYLSCQKMPDYRYVPGENPVFLNEKLSKIEKDVVVRFIVMGTKWLEAEREFQALVSLEGDYLGPLSD

SEQ ID NO: 303 - protein, 180 aa, M. Truncatula
MFLKVQLPWNVIIAAENLKPGSLMLQRAILIRLLSDFAAKKATKDMGYFLAVTTLDKIGEGKVRQHTGDVLFPVVFNAVTFKIFKGEVLEGVVHKVLKHGVFMRIGPIENAYLSSSKMPGYVYVLGENPYFMNQKMPKIAKDVKVRVVVIGTKWMEAEREFQALVGLEGDYLGPISSPDM

SEQ ID NO: 304 - protein, 176 aa, R. Communis
MYLKVQLPWNVIISAEHLDAKGLMLQRSIIIRLLEDFASKKATKDLGYYLAVTTLESIGEGKVREHTGDVLFPVVFNGITFKIFRGEILEGVVHKVLKHGVFIRCGPIENIYLSCMKMPDYHYVPGENPVFLNDKTSKIEKDVVVRFIVIGTKWLEAEREFQALVSLEGDYLGPVS

SEQ ID NO: 305 - protein, 197 aa, G. max
MIKIGSVGVAVTRKKQTMFLKVQLHWNVIIAAENLQPEGLMLHRAIIVRLLSDFAVKKATKDLGYFLAVTTLEKIGEGKVRQHTGDVLFPVVFNVITFKFFKGEILEGVVHKVLKHGVFMRCGPIENVYLSNLKMPDYRYVPGENACFMNDKMSKIGKDVTVRFSVIGTKWMEAEREFQALVSLEGDYLGPISTPDI

SEQ ID NO: 306 - protein, 175 aa, Z. mays
MVFLEAEMSWNVLISPSQLDRKGLLLRKAIIVRLLEDVTNRRASKEHGYYIAVNQLKAISEGKVRELTGDVLFPVSFTCITQKPMKGEVMVGHVDRILKHGVFLKSGPVESIFLAEKSMSNYKYIGGENAMFMNDHSKLEKDTAVRFKVLGFRWMEADRQFQLLATIAGDFLGPL

SEQ ID NO: 307 - protein, 175 aa, S. Bicolor
MVFLEAEMSWNVLISPSQLDRKGLLLRKAIIVRLLEDVTNRRASKEHGYYVAVSQLKAISEGKVRELTGDVLFPVSFTCITLKPMKGEVMVGHVDRILKHGVFLKSGPVESIFLAEKSMSDYKYIGGENAMFMNDHSKLEKDTAVRFKVLGFRWMEADRQFQLLATIAGDFLGPL

SEQ ID NO: 308 - protein, 175 aa, O. Sativa
MVFLKVEMSLNVLISPSQLSPQGLLLRKAVIVRLLEDIANRKASKDHGYYIAVSELKAISEGKVRELTGDVLFPVTFTCITQKPMKGEVLVGSVDKILKHGIFLKSGPIESIFLSEKTMSDFKYIGGENAVFMNEHSKLEKDTVVRFKVMGFRWMEADRQFQLLATLAGDYLGPL

SEQ ID NO: 309 - protein, 175 aa, B. Distachyon
MVFLLADMSWNVLISPDQLSSKGLLLRKSILVRLLEDIANRKASKEHGYYIAVNELKEISEGKVRELTGDVLFPVTFTCITLKPMKGEILVGSVEKILKHGVFLKSGPIENVFLSEKTMNDYKYIGGENPMFMKDHSKLEKDTVLRFKAMGFRWMEADRQFQLLATLAGDFLGPL

SEQ ID NO: 310 - protein, 176 aa, P. trichocarpa
MFLKVQLPWNVIIPAENLDAKGLMLQRSIVVRLLDDFAKKGATKDLGYYLAVSTLESIGEGKVRQHTGDVLFPVVFSGITFKIFRGEILDGIVHKVLKHGVLLRCGPIENIYLSCMKMPDYRYVPGENPVFLNDKTSKIEKDVVVRFVVLGTKWLEAEREFQALVSLEGDYLGPVS

SEQ ID NO: 311 - protein, 233 aa, B. Napus
MGLYILETKGLVSFRYRALEQLVDTLESEELCVFLPDRSVVASDLFFPVKPSYSVERKMFIKVKLPWNVMIPAEAMDPNGLMIQRAVLIRLLDAFASKKATKDLGYFIALKNLEEIGEGRIRETTGEIVFPVVFSGITFKMFKGEIVHGVVRQVHKSGVFLRCGPCENVYLSQYKMPGYDYVVQGNPLFMNQNMSRIQIGSTVRVIVLDIQWKEAEKEFIALASLEGNNLGPF

SEQ ID NO: 312 - protein, 174 aa, A. thaliana
MFIKVKLPWDVTIPAEDMDTGLMLQRAIVIRLLEAFSKEKATKDLGYLITPTILENIGEGKIKEQTGEIQFPVVFNGICFKMFKGEIVHGVVHKVHKTGVFLKSGPYEIIYLSHMKMPGYEFIPGENPFFMNQYMSRIQIGARVRFVVLDTEWREAEKDFMALASIDGDNLGPF

SEQ ID NO: 313 - protein, 174 aa, A. lyrata
MFIKVKLPWDVTIPAEDMDTGLMLQRAIVIRLLEAFGTKKATKDLGYLITPTILENIGEGKIKEQTGEIQFPVVFNGICFKMFKGEVVHGVVQKVHKSGVFLRSGPYEIIYLSHVKMPGYEFIPGEKPIFMNQNMSRIQIGARVRFIVLDTEWREAEKDFMALASIDGDNLGPF

SEQ ID NO: 314 - protein, 175 aa, Cucumis sativus; identical to SEQ ID NO: 301

SEQ ID NO: 315 - protein, 177 aa, V. Vinifera; identical to SEQ ID NO: 302

SEQ ID NO: 316 - protein, 180 aa, M. Truncatula; identical to SEQ ID NO: 303

SEQ ID NO: 317 - protein, 176 aa, R. Communis; identical to SEQ ID NO: 304

SEQ ID NO: 318 - protein, 198 aa, G. max
MIKIGSVGVAVSTRKKQTMFLKVQLHWNVIIAAENLQPEGLMLHRAIIVRLLSDFAVKKATKDLGYFLAVTTLEKIGEGKVRQHTGDVLFPVVFNVITFKFFKGEILEGVVHKVLKHGVFMRCGPIENVYLSNLKMPDYRYVPGENACFMNDKMSKIGKDVTVRFSVIGTKWMEAEREFQALVSLEGDYLGPISTPDI

SEQ ID NO: 319 - protein, 175 aa, Z. mays; identical to SEQ ID NO: 306

SEQ ID NO: 320 - protein, 175 aa, S. Bicolor; identical to SEQ ID NO: 307

SEQ ID NO: 321 - protein, 175 aa, O. Sativa
MVFLKVDMSWNVLISPSELSPKGLLLRKAVIVSLLEEIANRKASKDHGYYIAVSELKAISEGKVRELTGDVLFPVTFTCITQKPTKGEILVGSVDKILKHGVFLKSGPIESIFLSEKTLSDYKYIGGENPMFMNDHSKLEKDTAVRFKVMGFRWMEADRQFQILATLAGDYLGPL

SEQ ID NO: 322 - protein, 175 aa, B. Distachyon; identical to SEQ ID NO: 309

SEQ ID NO: 323 - protein, 176 aa, P. trichocarpa; identical to SEQ ID NO: 310

SEQ ID NO: 324 - protein, 233 aa, B. Napus; identical to SEQ ID NO: 311

SEQ ID NO: 325 - protein, 205 aa, A. thaliana
MLTEEELKRLYRIQKTLMQMLRDRGYFIADSELTMTKQQFIRKHGDNMKREDLVTLKAKRNDNSDQLYIFFPDEAKVGVKTMKMYTNRMKSENVFRAILVVQQNLTPFARTCISEISSKFHLEVFQEAEMLVNIKEHVLVPEHQVLTTEEKKTLLERYTVKETQLPRIQVTDPIARYFGLKRGQVVKIIRPSETAGRYVTYRYVV

SEQ ID NO: 326 - protein, 205 aa, A. lyrata
MLTEEEIKRLYRIQKTLMQMLKDRGYFIADSELTMTKQQFIRKHGDNMKREDLVTLKVKRNDNSDQLYIFFPDEAKVGVKTMKMYTNRMKSENVYRAILVVQQNLTPFARTCISEISSKFHLEVFQEAEMLVNIKEHVLVPEHQVLTTEEKKTLLERYTVKETQLPRIQVTDPIARYFGLKRGQVVKIIRPSETAGRYVTYRYVV

SEQ ID NO: 327 - protein, 207 aa, C. Sativus
MVLSEEEITRLFRIRKTVFQMLRDRGYFVGDFEIDMTREQFKQKYGENMKREDIVINKSKRNDSSDQIYVFFPEEAKVGIKPLKTYTTRMKSENVFRAILVVQQNLTPFARACMSEATSKSFHLEVFQEAELLVNIKDHVLVPEHQLLNNEEKKTLLERYTVKETQLPRIQVTDPVARYYGLKRGQVVKIIRPSETAGRYVTYRYVV

SEQ ID NO: 328 - protein, 206 aa, V. Vinifera
MSASEEEISRLFRIRKTVMQMLKDRGYFVGDFEINMTKHQFVSKFGENMKREDLVINKAKRTDSSDQIYVFFPEEQKVGVKTMKTYTNRMKSENVFRAILVVQQNLTPFARTCINEISTKFHLEVFQEAELLVNIKEHVLVPEHQVLTSEEKKTLLERYTVKETQLPRIQVSDPIARYFGLKRGQVVKIIRPSETAGRYITYRYVV

SEQ ID NO: 329 - protein, 206 aa, M. Truncatula
MVFSEEEITRLYRIRKTVMQMLKDRNYLVGDFELNMSKHDFKDKYGENMKREDLVINKTKKDKPSDQIYVFFPEEAKVGVKTMKTYTNRMNSENVYRAILVCQTSLTPFAKTCVSEIASKFHLEVFQEAELLVNIKEHVLVPEHQILNDTEKKTLLERYTVKETQLPRIQVTDPVARYYGLKRGQVVKIIRPSETAGRYVTYRLVV

SEQ ID NO: 330 - protein, 225 aa, R. Communis
MTLSEDEIKRLFRIRRTVMQMLKDRTYLVTDSEINITKHQFTSKYGDNMKREDLVIHKSKRDGSDSFYPTKLLFLNQLEAWLPLYQIYVFFPEEQKVGVKTMKTYTNRMKSENVFRAILVVQQSLTPFARTCIAEIASKFHLEVFQESELLVNIKEHVLVPEHQVLTNEEKKTLLERYTVKETQLPRIQISDPIARYYGLKRGQVVKIIRPSETAGRYVTYRYVV

SEQ ID NO: 331 - protein, 206 aa, G. max
MVLSEEEMGRLYRIRKTVMQMLRDRGFLVGDFEINMSKHEFKSKYGEHMKREDLVINKSKKDNSGDQIYVFFPDEPKVGVKTMKTYTNRMNSENVYRAILVTQTNLTPFARTCISEISSKFHLEVFQEAELLVNIKEHELVPEHQVLTDAEKKTLLERYTVKETQLPRIQVTDPVARYYGLKRGQVVKIIRPSETAGRYVTYRFVV

SEQ ID NO: 332 - protein, 206 aa, Z. mays
MASPDDEISRLFRIRRTVYEMLRDRGYGVRDEQIKLERHKFIERYGNPVRRDELTFNATKLNGPSDQIYVFFPNEAKPGVKTIRNYVEKMKNENVFAGILVVQQALSAFARSAVQEVSQKYHLEVFQEAELLVNIKDHVLVPEHVLLTPEDKKTLLERYTVKETQLPRIQITDPIARYYGMKRGQVVKITRASETAGRYITYRYVV

SEQ ID NO: 333 - protein, 210 aa, O. Sativa
MSAGLVTEEVMVGRLVRIRRTVMQMLRDRGYLVVEHELAMGRRDFLRKYGESFHREDLLINKYKKNDPSDQIYVFFPNDDKVGMKHIKKYVEMMKAENVSRAVLVLQQNLTPFARSFLQELEPKIHLEIFQEAELLINIKEHVLVPEHQVLNNEEKKTLLERYTLKETQLPRIQITDPIARYYGLRRGQVVKIIRPSETAGRYVTYRYVV

SEQ ID NO: 334 - protein, 210 aa, B. Distachyon
MASGLVTDDAGVGRLVRIRSTVMHMLRDRGYLVVEHELAMTRRDFERKYGESFHREDLLINKCKKNDPNDQIYVFFPNDEKVGMKHIKKYVEMMNAEKVSRAVVVVQQNLTPFAKSFLQELEPKIHLEVFQDAEMLINIKEHVLVPEHQVLTNDEKKTLLERYTLKETQLPRIQITDPIARYYGLKRGQVVKIIRPSETAGRYVTYRYVV

SEQ ID NO: 335 - protein, 243 aa, P. trichocarpa; identical to SEQ ID NO: 284

SEQ ID NO: 336 - protein, 206 aa, B. Napus
MGLTEEEIKRIYRIQKTLMQMLKDRGYFIADSEITMTLSQFVRKHGDNMKREDLVTLRAKRNDSSDQLYVFFPDEVKVGINTMKVYTNRMKSENVYRAILVVQQNLTPFARNCISQISSKFHLEVFQEAEMLVNIKEHVLVPEHQVLTTEEKKTLLERYTVKETQLPRIQVTDPIARYFGLKRGQVVKIIRPSETAGRYVTYRYAV

SEQ ID NO: 337 - protein, 114 aa, A. thaliana
MSTMKFCRECNNILYPKEDKEQKILLYACRNCDHQEVADNSCVYRNEVHHSVSERTQILTDVASDPTLPRTKAVRCSKCQHREAVFFQATARGEEGMTLFFVCCNPNCGHRWRE

SEQ ID NO: 338 - protein, 114 aa, A. lyrata
MSTMKFCRECNNILYPKEDKEQKILLYACRNCDHQEVADNSCVYRNEVHHSVSERTQILTDVASDPTLPRTKAVRCAKCQHSEAVFFQATARGEEGMTLFFVCCNPNCGHRWRE

SEQ ID NO: 339 - protein, 114 aa, C. Melo
MSTMKFCRECNNILYPKEDRDEKILLYACRNCDHQEVADNNCVYRNEIHHAVGERTQVLQDVAADPTLPRTKAVRCAQCNHGEAVFFQATARGEEGMTLFFVCCNPNCGHRWRD

SEQ ID NO: 340 - protein, 114 aa, V. Vinifera
MSTMKFCRECNNILYPKEDREQKILLYACRNCDHQEVAENNCVYRNEIHHSVGERTQVLQDVAADPTLPRTKSVRCAQCNHGEAVFFQATARGEEGMTLFFVCCNPNCGYRWRD

SEQ ID NO: 341 - protein, 114 aa, M. Truncatula
MSTMKFCRECNNILYPKEDREQKILLYACRNCDHQEAADNFCVYRNEIHHSVAERTQVLQDVAADPTLPRTKAVRCVQCNHGEAVFFQATARGEEGMTLFFVCCNPNCGHRWRD

SEQ ID NO: 342 - protein, 266 aa, R. Communis
MSVYKFCPDCNNVLYPKEDRKQRILLYACRNCEHQEVADSNRVYRNEIHHSVSEHTQILQDVASDPTLPRTKSVRCSACGHGEAVFLQGGGYDTVLRLLQSKLWQSMERLLRSSSRTKLFADEAMAVLMYGQCNIYFAKWRAVEPSHHWHIAFPENEINKLHNNILYPKEDRDQKILLYACRNCDHQEIAESNCVYRNEVHHSAAERTQVLQDVAADPTLPRTKAVECQVCKHPEAVFFQATARGEEGMTLFFVCCNPICGHRWRD

SEQ ID NO: 343 - protein, 114 aa, G. max
MSAMKFCRECNNILYPKEDRDQKVLLFACRNCDHQEVADNFCVYRNEIHHSVGERTQVLQDVAADPTLPRTKSVRCSQCNHGEAVFFQATARGEEGMTLFFVCCNPNCGHRWRD

SEQ ID NO: 344 - protein, 114 aa, Z.mays
MSTMKFCRECNNILYPKEDREQKVLLYACRNCDHQEVADNNCVYRNVVHHSAGEFTQVLQDVAGDPTLPRTKSVRCSSCGHGEAVFFQATARGEEGMTLFFVCCNPSCGNRWRE

SEQ ID NO: 345 - protein, 114 aa, S. Bicolor
MSTMKFCRECNNILYPKEDREQKVLLYACRNCDHQEVADNNCVYRNVVHHSAGEFTQVLQDVAGDPTLPRTKSVRCASCGHGEAVFFQATARGEEGMTLFFVCCNPSCGNRWRE

SEQ ID NO: 346 - protein, 114 aa, O. Sativa
MSTMKFCRECNNILYPKEDRDQKILLYACRNCDHQEVADNNCVYRNVVHHSAGEFTQVLQDVAGDPTLPRTKAVRCAVCGHGEAVFFQATARGEEGMTLFFVCCNPSCGHRWRE

SEQ ID NO: 347 - protein, 114 aa, B. Distachyon
MSAMKFCRECNNILYPKEDRDQKVLLFACRNCDHQEVADNNCVYRNVVHHSAGEFTQVLQDVAGDPTLPRTKEVRCAVCGHGEAVFFQATARGEEGMTLFFVCCNPSCGHRWRE

SEQ ID NO: 348 - protein, 114 aa, P. trichocarpa
MSTMKFCRECNNILYPREDRDQKILLYACRNCDHQEIADDNCVYRNEVHHSVAERTQVLQDVAADPTLPRTKAVTCTVCKHPEAVFFQATSRGEEGMTLFFVCCNPNCGHRWRD

SEQ ID NO: 349 - protein, 131 aa, B. Napus
MYIFPITIFNRFRRHDISYTMKFCRECNNILYPKEDKEQKILRYACRNCDYQEIADNYCVHRNEVHHSVSEKTQILTDVASDPTLPRTKAVRCAKCQHREAVFFQATTRSEDGMALFFVCCNRNCGHRWRD

SEQ ID NO: 350 - protein, 114 aa, A. thaliana
MSTMKFCRECNNILYPKEDKEQSILLYACRNCDHQEAADNNCVYRNEVHHSVSEQTQILSDVASDPTLPRTKAVRCAKCQHGEAVFFQATARGEEGMTLFFVCCNPNCSHRWRE

SEQ ID NO: 351 - protein, 114 aa, A. lyrata; identical to SEQ ID NO: 338

SEQ ID NO: 352 - protein, 114 aa, C. Melo; identical to SEQ ID NO: 339

SEQ ID NO: 353 - protein, 114 aa, V. Vinifera; identical to SEQ ID NO: 340

SEQ ID NO: 354 - protein, 114 aa, M. Truncatula; identical to SEQ ID NO: 341

SEQ ID NO: 355 - protein, 266 aa, R. Communis; identical to SEQ ID NO: 342

SEQ ID NO: 356 - protein, 114 aa, G. max; identical to SEQ ID NO: 343

SEQ ID NO: 357 - protein, 114 aa, Z. mays; identical to SEQ ID NO: 344

SEQ ID NO: 358 - protein, 114 aa, S. Bicolor; identical to SEQ ID NO: 345

SEQ ID NO: 359 - protein, 114 aa, O. Sativa; identical to SEQ ID NO: 346

SEQ ID NO: 360 - protein, 114 aa, B. Distachyon
MSAMKFCRECNNILYPKEEKDRRVLLFACRNCEHQEVSDNTCVYRNEVHHAATERTQVLQDVASDPTLPRTKSVRCTACGHGEAVYFQATARGEEGMTLFYVCCNLSCGNRWRE

SEQ ID NO: 361 - protein, 114 aa, P. trichocarpa; identical to SEQ ID NO: 348

SEQ ID NO: 362 - protein, 111 aa, B. Napus
MKFCRECNNILYPKEDKKQKILRYACRNCDYQEIADNYCVHRNEVHHSVSEKTQILTDVASDPTVPRTKDVRCAKCQHREAVFFQATTRSEDGMALFFVCCNRNCSHHWRD

SEQ ID NO: 363 - protein, 878 aa, Artificial Sequence
  Synthetic Construct
METSSSLPLSPISIEPEQPSHRDYDITTRRGVGTTGNPIELCTNHFNVSVRQPDVVFYQYTVSITTENGDAVDGTGISRKLMDQLFKTYSSDLDGKRLAYDGEKTLYTVGPLPQNEFDFLVIVEGSFSKRDCGVSDGGSSSGTCKRSKRSFLPRSYKVQIHYAAEIPLKTVLGTQRGAYTPDKSAQDALRVLDIVLRQQAAERGCLLVRQAFFHSDGHPMKVGGGVIGIRGLHSSFRPTHGGLSLNIDVSTTMILEPGPVIEFLKANQSVETPRQIDWIKAAKMLKHMRVKATHRNMEFKIIGLSSKPCNQQLFSMKIKDGEREVPIREITVYDYFKQTYTEPISSAYFPCLDVGKPDRPNYLPLEFCNLVSLQRYTKPLSGRQRVLLVESSRQKPLERIKTLNDAMHTYCYDKDPFLAGCGISIEKEMTQVEGRVLKPPMLKFGKNEDFQPCNGRWNFNNKMLLEPRAIKSWAIVNFSFPCDSSHISRELISCGMRKGIEIDRPFALVEEDPQYKKAGPVERVEKMIATMKLKFPDPPHFILCILPERKTSDIYGPWKKICLTEEGIHTQCICPIKISDQYLTNVLLKINSKLGGINSLLGIEYSYNIPLINKIPTLILGMDVSHGPPGRADVPSVAAVVGSKCWPLISRYRAAVRTQSPRLEMIDSLFQPIENTEKGDNGIMNELFVEFYRTSRARKPKQIIIFRDGVSESQFEQVLKIEVDQIIKAYQRLGESDVPKFTVIVAQKNHHTKLFQAKGPENVPAGTVVDTKIVHPTNYDFYMCAHAGKIGTSRPAHYHVLLDEIGFSPDDLQNLIHSLSYVNQRSTTATSIVAPVRYAHLAAAQVAQFTKFEGISEDGKVPELPRLHENVEGNMFFC

SEQ ID NO: 364 - protein, 896 aa, Artificial Sequence
  Synthetic Construct
MDSDEPNGSGLPPPPPFVPANLVPEVEPVKKNILLPMARPRGSGSKGQKIPLLTNHFGVKFNKPSGYFFHYSVAINYEDGRPVEAKGIGRKILDKVQETYQSDLGAKYFAYDGEKTLFTVGALPSNKLDFSVVLEEIPSSRNHAGNDTNDADRKRSRRPNQTKKFMVEISYAAKIPMQAIASALQGKETENLQDALRVLDIILRQSAARQGCLLVRQSFFHNDVKNFVPIGGGVSGCRGFHSSFRTTQGGLSLNIDTSTTMIVQPGPVVDFLLANQNKKDPYGMDWNKARRVLKNLRVQITLSNREYKISGLSEHSCKDQLFTWRKPNDKGEFEEVEITVLNYYKERNIEVRYSGDFPCINVGKPKRPTYFPIEFCNLVSLQRYTKSLTNFQRAALVEKSRQKPPERMASLTKGLKDSNYNADPVLQDSGVSIITNFTQVEGRILPTPMLKVGKGENLSPIKGKWNFMRKTLAEPTTVTRWAVVNFSARCDTNTLIRDLIKCGREKGINVEPPFKDVINENPQFRNAPATVRVENMFEQIKSKLPKPPLFLLCILAERKNSDVYGPWKKKNLVDLGIVTQCIAPTRLNDQYLTNVLLKINAKLGGLNSLLAMERSPAMPKVTQVPTIIVGMDVSHGSPGQSDIPSIAAVVSSRQWPLISKYKACVRTQSRKMEMIDNLFKPVNGKDEGMFRELLLDFYYSSENRKPEHIIIFRDGVSESQFNQVLNIELDQMMQACKFLDDTWHPKFTVIVAQKNHHTKFFQSRGPDNVPPGTIIDSQICHPRNFDFYLCAHAGMIGTTRPTHYHVLYDEIGFATDDLQELVHSLSYVYQRSTTAISVVAPVCYAHLAAAQMGTVMKYEELSETSSSHGGITTPGAVPVPPMPQLHNNVSTSMFFC

SEQ ID NO: 365 - protein, 501 aa, Artificial Sequence
  Synthetic Construct
MDTGGNSLASGPDGVKRKVCYFYDPEVGNYYYGQGHPMKPHRIRMTHALLAHYGLLQHMQVLKPFPARDRDLCRFHADDYVSFLRSITPETQQDQIRQLKRFNVGEDCPVFDGLYSFCQTYAGGSVGGSVKLNHGLCDIAINWAGGLHHAKKCEASGFCYVNDIVLAILELLKQHERVLYVDIDIHHGDGVEEAFYATDRVMTVSFHKFGDYFPGTGHIQDIGYGSGKYYSLNVPLDDGIDDESYHLLFKPIMGKVMEIFRPGAVVLQCGADSLSGDRLGCFNLSIKGHAECVKFMRSFNVPLLLLGGGGYTIRNVARCWCYETGVALGVEVEDKMPEHEYYEYFGPDYTLHVAPSNMENKNSRQMLEEIRNDLLHNLSKLQHAPSVPFQERPPDTETPEVDEDQEDGDKRWDPDSDMDVDDDRKPIPSRVKREAVEPDTKDKDGLKGIMERGKGCEVEVDESGSTKVTGVNPVGVEEASVKMEEEGTNKGGAEQAFPPKT

SEQ ID NO: 366 - protein, 409 aa, Artificial Sequence
  Synthetic Construct
MASLADGGKRRVSYFYEPMIGDYYYGVNQPTKPQRIRVTHNLILSYNLHRHMEINHPDLADASDFEKFHSLEYINFLKSVTPETVTDPHPSVSENLKRFNVDVDWDGPVFHNLFDYCRAYAGGSISAAAKLNRQEADIAINWAGGMHHVKKDKASGFGYVNDVVLAILELLKSFKRVLYIEIGFPHGDEVEEAFKDTDRVMTVSFHKVGDTGDISDYGEGKGQYYSLNAPLKDGLDDFSLRGLFIPVIHRAMEIYEPEVIVLQCGADSLAGDPFGTFNLSIKGHGDCLQYVRSFNVPLMILGGGGYTLPNVARCWCYETAIAVGEQLDNDLPGNDYMKYFRPDYKLHILPTNRQNLNTRLDIITMRETLLAQLSLVMHAPSVPFQDTPSSSQATEAAEVDMEKRNDPRI

SEQ ID NO: 367 - protein, 426 aa, Artificial Sequence
  Synthetic Construct
MRSKDKISYFYDGDVGSVYFGPNHPMKPHRLCMTHHLILAYGLHSKMEVYRPHKAYPIEMAQFHSPDYVEFLQRINPENQNLFPNEMARYNLGEDCPVFEDLFEFCQLYAGGTIDAARRLNNKLCDIAINWAGGLHHAKKCDASGFCYINDLVLGILELLKHHPRVLYIDIDVHHGDGVEEAFYFTDRVMTVSFHKFGDKFFPGTGDVKEIGEREGKFYAINVPLKDGIDDSSFNRLFRTIISKVVEIYQPGAIVLQCGADSLARDRLGCFNLSIDGHAECVKFVKKFNLPLLVTGGGGYTKENVARCWTVETGILLDTELPNEIPENDYIKYFAPDFSLKIPGGHIENLNTKSYISSIKVQILENLRYIQHAPSVQMQEVPPDFYIPDFDEDEQNPDVRADQRSRDKQIQRDDEYFDGDNDNDAS

SEQ ID NO: 368 - skipped

SEQ ID NO: 369 - protein, 501 aa, Artificial Sequence
  Synthetic Construct
MVVETIERSCEGSKRRHVNGGDIAVPCSGEECSNGDINVAPGVSAKRARVSREMTFEDIYGADALLNDDDDEDDDCDWEPVQAPMEFVKWCCVNCTMSNPGDMVHCCICGEHKESGILRHGYLASPFFKDTGLIEVEEKYGGSSSATSSTAVGFDERMLLHSEFEVKAQPHPERPDRLRAIAASLATAGVFPGRCLPINAREITKQELQMVHTSEHVDAVDTTSQLLYSYFTSDTYANEYSARAARLAAGLCADLATDIFTGRVKNGFALVRPPGHHAGVRHAMGFCLHNNAAVAALVAQAAGAKKVLIVDWDVHHGNGTQEIFEQNKSVLYISLHRHEGGNFYPGTGAADEVGSNGGEGYCVNVPWSCGGVGDKDYIFAFQHVVLPIASAFSPDFVIISAGFDAARGDPLGCCDVTPAGYSRMTQMLGDLCGGKMLVILEGGYNLRSISASATAVIKVLLGENPENELPIATTPSVAGLQTVLDVLNIQLEFWPSLAISY

SEQ ID NO: 370 - protein, 423 aa, Artificial Sequence
  Synthetic Construct
MSMALIVRPFFVPGSAGISGSRNICKKNQWRKYLLKPSGSSINCSFSTEKNPLLPSIQQLADARLIYSVSAALGHNKESHPECSARVPAIVNALEMNELTPKFRGSQILELANFKTATVEDIANVHDKAYVFGLEKAMDEASDSGLIFIEGSGPTYATSTTFQDSLIAAGAGMALVDSVIAASRNSVDPPIGFALIRPPGHHAVPKGPMGFCVFGNVAIAARHAQRTHGLKRIFIIDFDVHHGNGTNDAFTEDPDIFFLSTHQDGSYPGTGKISDIGKGKGEGTTLNLPLPGGSGDIAMRTVFEEIIVPCAQRFKPDIILVSAGYDAHVLDPLANLQFTTATYYSLAKDIKRLAKEVCGGRCVFFLEGGYNLESLSSSVADSFRALLGEDSLASEFDNPAYLYDEPMRKVRDAIQRAKSIHCL

SEQ ID NO: 371 - protein, 16 aa, Artificial Sequence
  Synthetic Construct
DKKNSETESGPAAWGS

SEQ ID NO: 372 - protein, 95 aa, Artificial Sequence
  Synthetic Construct
MLRSSDKKNSETESGPAAWGSSDKKNSETESGPAAWGSSDKKNSETESGPAAWGSSDKKNSETESGPAAWGSSDKKNSETESGPAAWGSPGLQTC

SEQ ID NO: 373 - protein, 791 aa, Artificial Sequence
  Synthetic Construct
MAARNKQKKRAEPESDLCFAGKPMSVVESTIRWPHRYQSKKTKLQAPTKKPANKGGKKEDEEIIKQAKCHFDKALVDGVLINLNDDVYVTGLPGKLKFIAKVIELFEADDGVPYCRFRWYYRPEDTLIERFSHLVQPKRVFLSNDENDNPLTCIWSKVNIAKVPLPKITSRIEQRVIPPCDYYYDMKYEVPYLNFTSADDGSDASSSLSSDSALNCFENLHKDEKFLLDLYSGCGAMSTGFCMGASISGVKLITKWSVDINKFACDSLKLNHPETEVRNEAAEDFLALLKEWKRLCEKFSLVSSTEPVESISELEDEEVEENDDIDEASTGAELEPGEFEVEKFLGIMFGDPQGTGEKTLQLMVRWKGYNSSYDTWEPYSGLGNCKEKLKEYVIDGFKSHLLPLPGTVYTVCGGPPCQGISGYNRYRNNEAPLEDQKNQQLLVFLDIIDFLKPNYVLMENVVDLLRFSKGFLARHAVASFVAMNYQTRLGMMAAGSYGLPQLRNRVFLWAAQPSEKLPPYPLPTHEVAKKFNTPKEFKDLQVGRIQMEFLKLDNALTLADAISDLPPVTNYVANDVMDYNDAAPKTEFENFISLKRSETLLPAFGGDPTRRLFDHQPLVLGDDDLERVSYIPKQKGANYRDMPGVLVHNNKAEINPRFRAKLKSGKNVVPAYAISFIKGKSKKPFGRLWGDEIVNTVVTRAEPHNQCVIHPMQNRVLSVRENARLQGFPDCYKLCGTIKEKYIQVGNAVAVPVGVALGYAFGMASQGLTDDEPVIKLPFKYPECMQAKDQI

SEQ ID NO: 374 - protein, 1295 aa, Artificial Sequence
  Synthetic Construct
MLSPAKCESEEAQAPLDLHSSSRSEPECLSLVLWCPNPEEAAPSSTRELIKLPDNGEMSLRRSTTLNCNSPEENGGEGRVSQRKSSRGKSQPLLMLTNGCQLRRSPRFRALHANFDNVCSVPVTKGGVSQRKFSRGKSQPLLTLTNGCQLRRSPRFRAVDGNFDSVCSVPVTGKFGSRKRKSNSALDKKESSDSEGLTFKDIAVIAKSLEMEIISECQYKNNVAEGRSRLQDPAKRKVDSDTLLYSSINSSKQSLGSNKRMRRSQRFMKGTENEGEENLGKSKGKGMSLASCSFRRSTRLSGTVETGNTETLNRRKDCGPALCGAEQVRGTERLVQISKKDHCCEAMKKCEGDGLVSSKQELLVFPSGCIKKTVNGCRDRTLGKPRSSGLNTDDIHTSSLKISKNDTSNGLTMTTALVEQDAMESLLQGKTSACGAADKGKTREMHVNSTVIYLSDSDEPSSIEYLNGDNLTQVESGSALSSGGNEGIVSLDLNNPTKSTKRKGKRVTRTAVQEQNKRSICFFIGEPLSCEEAQERWRWRYELKERKSKSRGQQSEDDEDKIVANVECHYSQAKVDGHTFSLGDFAYIKGEEEETHVGQIVEFFKTTDGESYFRVQWFYRATDTIMERQATNHDKRRLFYSTVMNDNPVDCLISKVTVLQVSPRVGLKPNSIKSDYYFDMEYCVEYSTFQTLRNPKTSENKLECCADVVPTESTESILKKKSFSGELPVLDLYSGCGGMSTGLSLGAKISGVDVVTKWAVDQNTAACKSLKLNHPNTQVRNDAAGDFLQLLKEWDKLCKRYVFNNDQRTDTLRSVNSTKETSGSSSSSDDDSDSEEYEVEKLVDICFGDHDKTGKNGLKFKVHWKGYRSDEDTWELAEELSNCQDAIREFVTSGFKSKILPLPGRVGVICGGPPCQGISGYNRHRNVDSPLNDERNQQIIVFMDIVEYLKPSYVLMENVVDILRMDKGSLGRYALSRLVNMRYQARLGIMTAGCYGLSQFRSRVFMWGAVPNKNLPPFPLPTHDVIVRYGLPLEFERNVVAYAEGQPRKLEKALVLKDAISDLPHVSNDEDREKLPYESLPKTDFQRYIRSTKRDLTGSAIDNCNKRTMLLHDHRPFHINEDDYARVCQIPKRKGANFRDLPGLIVRNNTVCRDPSMEPVILPSGKPLVPGYVFTFQQGKSKRPFARLWWDETVPTVLTVPTCHSQALLHPEQDRVLTIRESARLQGFPDYFQFCGTIKERYCQIGNAVAVSVSRALGYSLGMAFRGLARDEHLIKLPQNFSHSTYPQLQETIPH

SEQ ID NO: 375 - protein, 624 aa, Artificial Sequence
  Synthetic Construct
MAGKRKRANAPDQTERRSSVRVQKVRQKALDEKARLVQERVKLLSDRKSEICVDDTELHEKEEENVDGSPKRRSPPKLTAMQKGKQKLSVSLNGKDVNLEPHLKVTKCLRLFNKQYLLCVQAKLSRPDLKGVTEMIKAKAILYPRKIIGDLPGIDVGHRFFSRAEMCAVGFHNHWLNGIDYMSMEYEKEYSNYKLPLAVSIVMSGQYEDDLDNADTVTYTGQGGHNLTGNKRQIKDQLLERGNLALKHCCEYNVPVRVTRGHNCKSSYTKRVYTYDGLYKVEKFWAQKGVSGFTVYKYRLKRLEGQPELTTDQVNFVAGRIPTSTSEIEGLVCEDISGGLEFKGIPATNRVDDSPVSPTSGFTYIKSLIIEPNVIIPKSSTGCNCRGSCTDSKKCACAKLNGGNFPYVDLNDGRLIESRDVVFECGPHCGCGPKCVNRTSQKRLRFNLEVFRSAKKGWAVRSWEYIPAGSPVCEYIGVVRRTADVDTISDNEYIFEIDCQQTMQGLGGRQRRLRDVAVPMNNGVSQSSEDENAPEFCIDAGSTGNFARFINHSCEPNLFVQCVLSSHQDIRLARVVLFAADNISPMQELTYDYGYALDSVHGPDGKVKQLACYCGALNCRKRLY

SEQ ID NO: 376 - protein, 819 aa, Artificial Sequence [sequence omitted]

SEQ ID NO: 377 - protein, 806 aa, Artificial Sequence [sequence omitted]

SEQ ID NO: 378 - protein, 1209 aa, Artificial Sequence
  Synthetic Construct
MGTELMRICVKEDSDDLPSVPPGFESYATFTLKRVVPATTSDKAKTPAIESVSATEQAKMEVESDEAKAARALRRRPWINHSGCDDDGDCAANNDNAASQNPDQNCDVKPALPKGVVRGCEECKDCQKVTARWHPDEARRPDLEDAPVFYPSEEEFEDTLNYIAKIRPEAEKYGICRIVPPPSWKPPCPLKEKQVWEGSKFTTRVQRVDKLQNRSSMKKISKLPNQMRKKKRKCMKMGMDSVTNGMGDPCSASTGMNELETFGFEPGPGFTLKDFQKYADEFKAQYFKKSETSTDDKCKVDNSIDCWEPALEDVEGEYWRIVDKATEEIEVLYGADLETGVFGSGFPKISSSHNASSSEDKYAKSGWNLNNFPRLPGSLLKYEGSDISGVLVPWLYIGMCFSSFCWHVEDHHLYSLNYMHWGAPKLWYGVGGKDAVKLEEAMRKHLPDLFEEQPDLLHKLVTQLSPSKLKTAGVPVHRCVQHAGEFVLTFPRAYHAGFNSGFNCAEAVNVAPVDWLPHGQIAIELYCQQGRKTSISHDKLLLGAAREVVKADWELNLLRKNTVDNLRWKAFSAKDGILAKTLKARIDMERTRREFLCNSSLALKMHSNFDATNERECCICFFDLHLSAAGCRCSPEKYSCLTHVKELCSCPWVTKYFLFRYDIDELNVLVEAVEGKLSSVYRWARQDLGLALSTDVSGSKMEIDEEGKVHKDPTPQTTALSGKDLQLKVTSKEVSKELEKTSKLSHVNLLLKEKEEQITSSHCMKPVKEETVCDSSDPNVSACQPSEGGIICMTAVKSASGKKNSQSLPNDVILLSDDEYDIPRKRGSVRRDAISSGKKLEIRERPTHVLALEASAKIAAPICQREGDSLRDTRNTISLPTNDQKTMRRDVPSSTSHAEVNAEATGLTQDICNRMATNSHGGGKPTSCKSKNSGGLAIVDVVDGTRSSSGTPSCSQNNSPDRFIRQKGPRIAKVVRRINCNVEPLSYGCVLSGKSWCSRRAIFPKGFRSRVKYINILDPTNMCFYISEILDAGRNSPLFMVYLESNPSEVFVHMSPTRCWEMVRERVNQEITKQHKAGKSDLPPLQPSGSPDGFEMFGYSSPAIVQAIEALDVNRVCTDYWDSRPYSRPQVQFPANPLLREANTSGRSNVGNLQLNPGHHISPTGINSILKVLFKKASMEELSSLQEVLSETNSDMVTELVKEEIQNRR

SEQ ID NO: 379 - protein, 1410 aa, Artificial Sequence
  Synthetic Construct
MECIGKRVKSRSWQRLQAVNKRKKMETVAPVTSPPKKRRQKKPKNYDSDIEDITPTCNDSVPPPQVSNMYSVPNNSVKESFSRIMRDLNVEKKSGPSSSRLTDGSEQNPCLKERSFRVSDLGVEKKCSPEITDLDVGIPVPRFSKLKDVSEQKNTCLMQKSSPEIADLDLVISVPSSSVLKDVSEEIRFLKDKCSPEIRGLVLEKSVPGEIEILSDSESETEARRRASAKKKLFEESSRIVESISDGEDSSSETDEEEEENQDSEDNNTKDNVTVESLSSEDPSSSSSSSSSSSSSSSSSSSDDESYVKEVVGDNRDDDDLRKASSPIKRVSLVERKALVRYKRSGSSLTKPRERDNKIQKLNHREEEKKERQREVVRVVTKQPSNVVYTCAHCGKENTGNPESHSSFIRPHSIRDEIEDVNNFASTNVSKYEDSVSINSGKTTGAPSRPEVENPETGKELNTPEKPSISRPEIFTTEKAIDVQVPEEPSRPEIYSSEKAKEVQAPEMPSRPEVFSSEKAKEIQVPEMPSIPEIQNSEKAKEVQANNRMGLTTPAVAEGLNKSVVTNEHIEDDSDSSISSGDGYESDPTLKDKEVKINNHSDWRILNGNNKEVDLFRLLVNSVWEKGQLGEEDEADELVSSAEDQSQEQAREDHRKYDDAGLLIIRPPPLIEKFGVEEPQSPPVVSEIDSEEDRLWEELAFFTKSNDIGGNELFSNVEKNISANETPAAQCKKGKHDLCIDLEVGLKCMHCGFVEREIRSMDVSEWGEKTTRERRKFDRFEEEEGSSFIGKLGFDAPNNSLNEGCVSSEGTVWDKIPGVKSQMYPHQQEGFEFIWKNLAGTIMLNELKDFENSDETGGCIMSHAPGTGKTRLTIIFLQAYLQCFPDCKPVIIAPASLLLTWAEEFKKWNISIPFHNLSSLDFTGKENSAALGLLMQKNATARSNNEIRMVKIYSWIKSKSILGISYNLYEKLAGVKDEDKKTKMVREVKPDKELDDIREILMGRPGLLVLDEAHTPRNQRSCIWKTLSKVETQKRILLSGTPFQNNFLELCNVLGLARPKYLERLTSTLKKSGMTVTKRGKKNLGNEINNRGIEELKAVMLPFVHVHKGSILQSSLPGLRECVVVLNPPELQRRVLESIEVTHNRKTKNVFETEHKLSLVSVHPSLVSRCKISEKERLSIDEALLAQLKKVRLDPNQSVKTRFLMEFVELCEVIKEKVLVFSQYIDPLKLIMKHLVSRFKWNPGEEVLYMHGKLEQKQRQTLINEFNDPKSKAKVFLASTKACSEGISLVGASRVILLDVVWNPAVERQAISRAYRIGQKRIVYTYHLVAKGTPEGPKYCKQAQKDRISELVFACSSRHDKGKEKIAEAVTEDKVLDTMVEHSKLGDMFDNLIVQPKEADLVEGFSILMP

SEQ ID NO: 380 - protein, 1261 aa, Artificial Sequence
  Synthetic Construct
MKKRGFYNLKHPFDPCPFEFFCSGTWKPVEYMRIEDGMMTIRLLENGYVLEDIRPFQRLRLRSRKAALSDCICFLRPDIDVCVLYRIHEDDLEPVWVDARIVSIERKPHESECSCKINVRIYIDQGCIGSEKQRINRDSVVIGLNQISILQKFYKEQSTDQFYRWRFSEDCTSLMKTRLSLGKFLPDLSWLTVTSTLKSIVFQIRTVQTKMVYQIVTDEEGSSSTLSSMNITLEDGVSLSKVVKFNPADILDDSQDLEIKQETDYYQEEDEVVELRRSKRRNVRPDIYTGCDYEPDTIDGWVRMMPYQFGKCAVNVESDEDEDDNNEDGDTNDDLYIPLSRLFIKKKKTNSREAKPKSRKGEIVVIDKRRVHGFGRKERKSELSVIPFTPVFEPIPLEQFGLNANSFGGGGSFSRSQYFDETEKYRSKGMKYGKKMTEMEEMMEADLCWKGPNQVKSFQKRTSRSSRSVAPKTEDSDEPRVYKKVTLSAGAYNKLIDTYMNNIESTIAAKDEPTSVVDQWEELKKTNFAFKLHGDMEKNLSEDGEGETSENEMLWREMELCLASSYILDDNEVRVDNEAFEKARSGCEHDYRLEEEIGMCCRLCGHVGSEIKDVSAPFAEHKKWTIETKHIEEDDIKTKLSHKEAQTKDFSMISDSSEMLAAEESDNVWALIPKLKRKLHVHQRRAFEFLWRNVAGSVEPSLMDPTSGNIGGCVISHSPGAGKTFLIIAFLTSYLKLFPGKRPLVLAPKTTLYTWYKEFIKWEIPVPVHLIHGRRTYCTFKQNKTVQFNGVPKPSRDVMHVLDCLEKIQKWHAHPSVLVMGYTSFTTLMREDSKFAHRKYMAKVLRESPGLLVLDEGHNPRSTKSRLRKALMKVGTDLRILLSGTLFQNNFCEYFNTLCLARPKFIHEVLMELDQKFKTNHGVNKAPHLLENRARKLFLDIIAKKIDASVGDERLQGLNMLKNMTNGFIDNYEGSGSGSGDALPGLQIYTLVMNSTDIQHKILTKLQDVIKTYFGYPLEVELQITLAAIHPWLVTSSNCCTKFFNPQELSEIGKLKHDAKKGSKVMFVLNLIFRVVKREKILIFCHNIAPIRMFTELFENIFRWQRGREILTLTGDLELFERGRVIDKFEEPGNPSRVLLASITACAEGISLTAASRVIMLDSEWNPSKTKQAIARAFRPGQQKVVYVYQLLSRGTLEEDKYRRTTWKEWVSCMIFSEEFVADPSLWQAEKIEDDILREIVGEDKVKSFHMIMKNEKASTG

SEQ ID NO: 381 - protein, 1132 aa, Artificial Sequence
  Synthetic Construct
MDMTSCVARRTRSRTESYLNSILNKSKGISGEEEDQSLGCVNSRTEKRRVNMRDACSPSPRKKKRRRRKDDDDDVVFVRTEYPEGKRDDENVGSTSGNLQSKSFDFGDRVCDFDADDRNLGCEEKASNFNPIDDDDDVVFVGTVQRENDHVEDDDNVGSASVISPRVCDFDEDDAKVSGKENPLSPDDDDDVVFLGTIAGENQHVEDVNAGSEVCDILLDDANLRGEEKTYVSDEVVSLSSSSDDEEDPLEELGTDSREEVSGEDRDSGESDMDEDANDSDSSDYVGESSDSSDVESSDSDFVCSEDEEGGTRDDATCEKNPSEKVYHHKKSRTFRRKHNFDVINLLAKSMLESKDVFKEDIFSWDKIAEVDSREDPVVRESSSEKVNEHGKPRERRSFHRVREKNHLNGESFYGGEKLCDGEETINYSTEDSPPLNLRFGCEEPVLIEKTEEEKELDSLWEDMNVALTLEGMHSSTPDKNGDMLCSKGTHDFVLDDEIGLKCVHCAYVAVEIKDISPAMDKYRPSVNDNKKCSDRKGDPLPNRLEFDASDPSSFVAPLDNIEGTVWQYVPGIKDTLYPHQQEGFEFIWKNLAGTTKINELNSVGVKGSGGCIISHKAGTGKTRLTVVFLQSYLKRFPNSHPMVIAPATLMRTWEDEVRKWNVNIPFYNMNSLQLSGYEDAEAVSRLEGNRHHNSIRMVKLVSWWKQKSILGISYPLYEKLAANKNTEGMQVFRRMLVELPGLLVLDEGHTPRNQSSLIWKVLTEVRTEKRIFLSGTLFQNNFKELSNVLCLARPADKDTISSRIHELSKCSQEGEHGRVNEENRIVDLKAMIAHFVHVHEGTILQESLPGLRDCVVVLNPPFQQKKILDRIDTSQNTFEFEHKLSAVSVHPSLYLCCNPTKKEDLVIGPATLGTLKRLRLKYEEGVKTKFLIDFIRISGTVKEKVLVYSQYIDTLKLIMEQLIAECDWTEGEQILLMHGKVEQRDRQHMIDNFNKPDSGSKVLLASTKACSEGISLVGASRVVILDVVWNPSVESQAISRAFRIGQKRAVFIYHLMVKDTSEWNKYCKQSEKHRISELVFSSTNEKDKPINNEVVSKDRILDEMVRHEKLKHIFEKILYHPKKSDMNTSFF

SEQ ID NO: 382 - protein, 638 aa, Artificial Sequence
  Synthetic Construct
MNNKLSDFEKNLYKKLKSGKLEVKVSYRTFLCPYCPDNKKKVGLYVDILQHASGVGNSQSKKRSLTEKASHRALAKYLIKDLAHYATSTISKRLKARTSFIPAETGDAPIIYDDAQFEKLVWPWKGVLVNIPTTSTEDGRSCTGESGPKLKDELIRRGFNPIRVRTVWDRFGHSGTGIVEFNRDWNGLQDALVFKKAYEGDGHGKKDWLCGATDSSLYAWLANADDYYRANILGENLRKMGDLKSIYRFAEEEARKDQKLLQRLNFMVENKQYRLKKLQIKYSQDSVKLKYETEEKEKILRAYSEDLTGRQQKSTDHFNRIFADHEKQKVQLESQIKELEIRKLELAKREAENETQRKIVAKELEQNAAINSYVQLSALEQQKTREKAQRLAVDHKMQKEKLHKRIAALERQLDQKQELELEVQQLKSQLSVMRLVELDSGSEIVNKVETFLRDLSETEGELAHLNQFNQDLVVQERKSNDELQEARRALISNLRDMGLHIGVKRMGELDTKPFMKAMRIKYCQEDLEDWAVEVIQLWEEYLKDPDWHPFKRIKLETAETIVEVIDEDDEKLRTLKNELGDDAYQAVANALLEINEYNPSGRYISSELWNFREDRKATLEEGVNSLLEQWNQAKHLKS

SEQ ID NO: 383 - protein, 472 aa, Artificial Sequence
  Synthetic Construct
MGGTRHCYGLGYEMFNFVWSSSVRFVWSSSETLFKIVIITRSLCILGKVHTLLTFKVLTFLLKIELQCVFSDCVYVAETGIVVNIPTTKAQDGRPAGESGSKLRDEYILRGLNNGLLFDKAYRVDGHGKKDWMKKDGPKLGLYGWIAGADDYNDRELKTIAELTKEEARKQQMLVKNLRQVVEEKIKDVKEIEELFDDHERLTKLLESEKKKLEIKGNELAKPQVHNGTERMKLSEDLEQRQKEELHEKIIRLERQIDQVQAIELEVEQLKGQLNVMKHMASDGDAQVVKEVDIIFKDLVEKEAELADLNKFNQTLILRERRTNDELQEARKELVNCMGELVRKPFVDAMQQKYCQEDVEDRAVEVLQLWEHYINDPDWHPYKRVKLENQDREVEVIDDRDEKLRELKADLGDGPYNAVTKALLEINEYNPSGRYITTELWNFKEDKRATLEEGVTCLLDQWEKAKRKRGMA

SEQ ID NO: 384 - protein, 736 aa, Artificial Sequence
  Synthetic Construct
MYSRRELEDLEYRYYSEMKDGTRKVKISESLFRCPFCYIDRKRDYQFDDLLRHASGIGGSSRTKDGRDKARHLALERYMRKYLRPRERPRPSPTSDVSSLPKEEFTGKWKSTLSTTEEGEFITTENSSSPHIVKAEPKFVSGDDSGRSGEERLKFSDKPDPFFSNEDKSYPAKRPCLVSGAKEGDEPVQRIGLSHGASFAPTYPQKLVSLGAGNGDQMYVHPWKGILANMKRTFNEKTRKYAGESGSKIREDLIKKGFNPHKVTPLWNGRLGFTGFAIVDFGKEWEGFRNATMFDKHFEVSQCGKRDHDLTRDPGDKLYGWVAKQDDYYSRTAIGDHLRKQGDLKSVSGKEAEDQRKTFTLVSNLENTLVTKSDNLQQMESIYKQTSSVLEKRMKEKDEMINTHNEKMSIMQQTARDYLASIYEEHEKASQHLEAQRKEYEDRENYLDKCQAKNKTERRKLQWQKHKNLMATQEQNKADEDMMRLAEQQQREKDELRKQVRELEEKIDAEQALELEIERMRGDLQVMGHMQEGEGEDSKIKEMIEKTKEELKEKEEDWEYQESLYQTLVVKHGYTNDELQDARKALIRSMRELTTRAYIGVKRMGALDETPFKKVAKEKYPAVEADKKAEELCSLWEEHLGDSAWHPIKVVEKDGIAKEELNEEDEKLQELRKELGEEVYAAVTQALKERNEYNGSGRYIVPELWNFKQNRKASIKEGVVYLVNSWKQKKPKPKRR

SEQ ID NO: 385 - protein, 634 aa, Artificial Sequence
  Synthetic Construct
MDNSSDEESEISESEIDVYYEKPYEKLMNGDYKVKVKDTFRCPFCAGKKKQHYKYKELLAHASGVAKGSASRSAKQKANHFALAKYMENELAGDADVPRPQIPSSSTEQSQAVVDDIYVWPWMGIVINPVRRTDNKNVLLDSAYWLKKLARFNPLEVKTLWLDQESVVAVIPQFNSGWSGFKSVTELEKEYEIRGCGRKDWIDKRGDWRSKAYGWCARADDYNSQGSIAEYLSKVGKLRSFSDITKEEIQNKSIVVDDLANKIAMTNEDLNKLQYMNNEKTLSLRRVLIEKDELDRVYKQETKKMQELSREKINRIFREKERLTNELEAKMNNLKIWSKQLDKKQALTELERQKLDEDKKKSDVMNSSLQLASLEQKKTDDRVLRLVDEHKRKKEETLNKILQLEKELDSKQKLQMEIQELKGKLKVMKHEDEDDEGIKKKMKKMKEELEEKCSELQDLEDTNSALMVKERKSNDEIVEARKFLITELRELVSDRNIIRVKRMGELEEKPFMTACRQRCTVEEEAQVQYAMLCSKWQEKVKDSAWQPFKHVGTGDRKKEVVDEEDEEIKKLREEWGEEVKNAVKTALEELNEFNPSGRYSVPELWNSKQGRKATLKEVIDYITQQVKTLKRRRA

SEQ ID NO: 386 - protein, 634 aa, Artificial Sequence
  Synthetic Construct
MSISDEEAEISESEIEDYSETPYRLLRDGTYKVKVNGQLRCPFCAGKKKQDYKYKELYAHATGVSKGSATRSALQKANHLALAMFLENELAGYAEPVPRPPVVPPQLDETEPNPHNVYVWPWMGIVVNPLKEADDKELLLDSAYWLQTLSKFKPIEVNAFWVEQDSIVGVIAKFNGDWSGFAGATELEKEFETQGSSKKEWTERSGDSESKAYGWCARADDFESQGPIGEYLSKEGQLRTVSDISQKNVQDRNTVLEELSDMIAMTNEDLNKVQYSYNRTAMSLQRVLDEKKNLHQAFADETKKMQQMSLRHIQKILYDKEKLSNELDRKMRDLESRAKQLEKHEALTELDRQKLDEDKRKSDAMNKSLQLASREQKKADESVLRLVEEHQRQKEDALNKILLLEKQLDTKQTLEMEIQELKGKLQVMKHLGDDDDEAVQKKMKEMNDELDDKKAELEGLESMNSVLMTKERQSNDEIQAARKKLIAGLTGLLGAETDIGVKRMGELDEKPFLDVCKLRYSANEAAVEAATLCSTWQENLKNPSWQPFKHEGTGDGAEEVVDEDDEQLKKLKREWGKEVHNAVKTALVEMNEYNASGRYTTPELWNFKEGRKATLKEVITFISNDIKILKRKRT

SEQ ID NO: 387 - protein, 635 aa, Artificial Sequence
  Synthetic Construct
MDISDEESEISESEIEEYSKTPYHLLRSETYYKVKVNGRLRCPFCVGKKKQDYKYKELHAHATGVSKGSATRSALQKSNHLALAKFLENDLAGYAEPLPRPPVVPPLLDETEPNPHNVYVWPWMGIVVNPLKETDDKELLLDSVYWLQTLSKFKPVEVNAFWVEQDSIVGVIAKFDSDWSGFAAATELEKEFETQGSCKKEWTERSGDSESKAYGWCARADDFQSQGPIGEYLSKEGTLRTVSDILQNNVQDRNTLLDVLSNMIDMTNEDLNKAQHSYNRTAMSLQRVLDEKKNLHQAFAEETKKMQQMSLRHIQRILYDKEKLRNELDRKMRDLESRAKQLEKHEALTELERQKLDEDKRKSDAMNKSLQLASREQKKADESVLRLVEEHQRQKEDALNKILLLEKQLDTKQTLEMEIQELKGKLQVMKHLGDDDDEAVQTKMKEMNDELDDKKAELEDLESMNSVLMTKERQSNDEIQAARQKMIAGLTGLLGAESDIGVKRMGELDEKPFLDVCKLRYSANEARVEAATLCSTWKENLKNPSWQPFKREGTGDGAEEVVDEDDEQLKKLKREWGKEVHNAVKAALVEMNEYNASGRYPTSELWNFKEGRKATLKEVITFISTDIKNLKRKRT

SEQ ID NO: 388 - protein, 561 aa, Artificial Sequence
  Synthetic Construct
MEKNQQKQEFLAETSEMKNTKNNDDCSVQQQQRFVWPWVGLVANIPTEVEPSGRRVGKSGSTLRDEFTMKGFNPTRVQPIWDFKGHSGFALVEFAKDFEGFESAMNFERSFNLDRHGKRDWEKGHRLRDNKLYGWVAREDDYNRSDTVGKNVKKKRDLKSISQIVEEDERKMVHLVENMSQTIEKKKQSKQELEQKVDETSRFLESLELHNVLLNKNYQEGFQKMQMKMEELYQQVLDGHEKSLAELEAKREKLDERARLIEQRAIINEEEMEKSRLEREMNQKAMCEQNEANEEAMKLAEKHQASSSLKEKEKLHKRIMEMEAKLNETQELELEIEKLKGTTNVMKHMVGSDGDKDIVEKIAKTQIQLDAQETALHEKMMTLARKERATNDEYQDVLKEMIQVWNANEELMKQEKIRVKRMGQLNPAPFLPAVMKKHKVTQSKAENKAMKLCSVWEANIGDVQWTPFRVDESDGTPKRVVDENDEKLRTLKNQYGEEVYNEVVRTKLEIEEHNASGSYVILELWNYEENRKATMEEATDVMLKIRSKLAAMKNKRKRLEV

SEQ ID NO: 389 - protein, 1107 aa, Artificial Sequence
  Synthetic Construct
MGKTIQVFGFPNGVSAEEVKKFLERLTGSGTVYAIKVRQPKKGGPRVYAIVQFTSERHTRLIITAAAERLYYGRSYLKAFEVEQDIVPKPRASLHTISGLKMFFGCQVSTKKFLTLWSAQDVCVSFGIGMRKLHFSFSWYQKDYRLELSYENIWQIDLHSPQGRSSKFLVIQVIGAPKIFEKEDQPINLLFGIMDFYSDGSDEQWIRTTDFTSSSCIGQSTAFCLELPVHLNVPDFRENFANYAEHRASSFLIESGSSYSSNANTLVPVVDPPPGFSLPFEILFKLNTLVQNACLSGPALDLDFYRLLNQKKYDRALIDHCLEKLFHLGECCYEPAHWLRDEYKKWISKGKLPLSPTISLDDGLVYMYRVQVTPARVYFSGPEVNVSNRVLRHYSKYINNFLRVSFVDEDLEKVRSMDLSPRSSTQRRTKLYDRIYSVLRDGIVIGDKKFEFLAFSSSQLRENSAWMFAPIDRITAAHIRAWMGDFDHIRNVAKYAARLGQSFSSSRETLNVRSDEIEVIPDVEIISLGTRYVFSDGIGKISAEFARKVARKCGLTEFSPSAFQIRYGGYKGVVAVDPNSSKKLSLRKSMSKFESENTKLDVLAWSKYQPCYMNRQLITLLSTLGVTDSVFEKKQREVVDRLDAILTHPLEAHEALGLMAPGENTNILKALILCGYKPDAEPFLSMMLQNFRASKLLELRTKTRIFISGGRSMMGCLDETRTLEYGQVVVQYSDPMRPGRRFIITGPVVVAKNPCLHPGDVRVLQAVNVPALNHMVDCVVFPQKGLRPHPNECSGSDLDGDIYFVCWDQELVPPRTSEPMDYTPEPTQILDHDVTIEEVEEYFANYIVNDSLGIIANAHTAFADKEPLKAFSDPCIELAKKFSTAVDFPKTGVAAVIPQHLYVKEYPDFMEKPDKPTYESKNVIGKLFREVKERAPPLISIKSFTLDVASKSYDKDMEVDGFEEYVDEAFYQKANYDFKLGNLMDYYGIKTEAEILSGGIMRMSKSFTKRRDAESIGRAVRALRKETLSLFNASEEEENESAKASAWYHVTYHSSYWGLYNEGLNRDHFLSFAWCVYDKLVRIKKTNLGRRQRQETLERLDHVLRFG

SEQ ID NO: 390 - skipped

SEQ ID NO: 391 - protein, 1580 aa, Artificial Sequence
  Synthetic Construct
MHSSLEPEKMEEGGGSNSLKRKFSEIDGDQNLDSVSSPMMTDSNGSYELKVYEVAKNRNIIAVLGTGIDKSEITKRLIKAMGSSDTDKRLIIFLAPTVNLVKQQCCEIRALVNLKVEEYFGAKGVDKWTSQRWDEEFSKHDVLVMTPQILLDVLRSAFLKLEMVCLLIIDECHHTTGNHPYAKLMKEFYHESTSKPKIFGLTASAVIRKGIVSSPSNYAAQVSELERLMDSKIFNPEEREGVEKFATTVKEGPILYNPSPSCSLELKEKLETSHLKFDASLRRLQELGKDSFLNMDNKFETYQKRLSIDYREILHCLDNLGLICAHLAAEVCLEKISDTKEESETYKECSMVCKEFLEDILSTIGVYLPQDDKSLVDLQQNHLSAVISGHVSPKLKELFHLLDSFRGDKQKQCLILVERIITAKVIERFVKKEASLAYLNVLYLTENNPSTNVSAQKMQIEIPDLFQHGKVNLLFITDVVEEGFQVPDCSCMVCFDLPKTMCSYSQSQKHAKQSNSKSIMFLERGNPKQRDHLHDLMRREVLIQDPEAPNLKSCPPPVKNGHGVKEIGSMVIPDSNITVSEEAASTQTMSDPPSRNEQLPPCKKLRLDNNLLQSNGKEKVASSKSKSSSSAAGSKKRKELHGTTCANALSGTWGENIDGATFQAYKFDFCCNISGEVYSSFSLLLESTLAEDVGKVEMDLYLVRKLVKASVSPCGQIRLSQEELVKAKYFQQFFFNGMFGKLFVGSKSQGTKREFLLQTDTSSLWHPAFMFLLLPVETNDLASSATIDWSAINSCASIVEFLKKNSLLDLRDSDGNQCNTSSGQEVLLDDKMEETNLIHFANASSDKNSLEELVVIAIHTGRIYSIVEAVSDSSAMSPFEVDASSGYATYAEYFNKKYGIVLAHPNQPLMKLKQSHHAHNLLVDFNEEMVVKTEPKAGNVRKRKPNIHAHLPPELLARIDVPRAVLKSIYLLPSVMHRLESLMLASQLREEIDCSIDNFSISSTSILEAVTTLTCPESFSMERLELLGDSVLKYVASCHLFLKYPDKDEGQLSRQRQSIISNSNLHRLTTSRKLQGYIRNGAFEPRRWTAPGQFSLFPVPCKCGIDTREVPLDPKFFTENMTIKIGKSCDMGHRWVVSKSVSDCAEALIGAYYVSGGLSASLHMMKWLGIDVDFDPNLVVEAINRVSLRCYIPKEDELIELERKIQHEFSAKFLLKEAITHSSLRESYSYERLEFLGDSVLDFLITRHLFNTYEQTGPGEMTDLRSACVNNENFAQVAVKNNLHTHLQRCATVLETQINDYLMSFQKPDETGRSIPSIQGPKALGDVVESIAGALLIDTRLDLDQVWRVFEPLLSPLVTPDKLQLPPYRELNELCDSLGYFFRVKCSNDGVKAQATIQLQLDDVLLTGDGSEQTNKLALGKAASHLLTQLEKRNISRKTSLGDNQSSMDVNLACNHSDRETLTSETTEIQSIVIPFIGPINMKKGGPRGTLHEFCKKHLWPMPTFDTSEEKSRTPFEFIDGGEKRTSFSSFTSTITLRIPNREAVMYAGEARPDKKSSFDSAVVELLYELERRKIVIIQK

SEQ ID NO: 392 - protein, 1493 aa, Artificial Sequence
  Synthetic Construct
MDRKGKGKQVAGSDSYSGGQKRKNSVEFRDEGLRIKKRKNPEVLQFFEESAEVGYYGGSSDEDDDGLGFLNDMEDEPEVEESSKAGKGEKGKSSFVFPKEEDLNEEEFDRIMEERYKPGSGFLRYADDDIKDAIEMDALAPTSKDPPIWKVKCAIGRERRSVFCLMHKFVELRKIGTKLEIISVFSVDHVKGFIFIEADKEHDVLEACKSLVGIYATRMVLLPKAETPNLLTVQKKTKKVSEGTWARVKNGKYKGDLAQIVAVSDTRNKALIKLIPRIDIQALTQKYGGGVTVQKGQTPAPRLISSSELEEFRPLIQVRRDRDTGITFEHLDSLMLKDGYLYKKVSLDSISSWGVIPTKDELLKFTPVDRKETGDVEWISEIYGEERKKKILPTCREGGKGEGSGGGKGEGSGGGKGEGSRGGKGEGSSDFKSESSYELYNLVCFSRKDFGLIVGVDDKGDGYKVLKEGIDGPVVVTVGKKEMQNGPFDSKFTALDLNKKQISVNDVVKISKGPSEGKQGVVRQVYRGIIFLYDESEEENGGYFCCKSQSCEKVKLFTEESNEKTGGFDGTAFEDFVSSPKSPLSPEKEWQPRERYNSSNQGDIGSTYSIGQKLRIRVGPLKGYLCRVIALRYSDVTVKLDSQHKIFTVKSEHLAEVRDRNTVLSTSGDAGTGSFQPFGMLGTESSTGDWAIGAGTSSEGGNWNIGGPSTDSHESLNIERNMVQLCREKNPWGGSKPTSDVSPTVADDNTSAWANAAAENKPASASDQPGGWNPWGKTPASEAGTVSGWGDTSASNVEASSWEKQGASTSNVADLGSWGTHGGSSGGNKQDEDSVWGKLCEASESSQKKEESSWGKKGGSDGESSWGNKDGNSSASKKDGVSWGQQDKGSDESKGGSAWSNQCGDFGSGKKKDGSSGWNKSAEDSNANSKGVPDWGQPNDGSSWGKKGDGAASWGKKDDGGSWGKKDDGNKDDGGSSWGKKDDGQKDDGGSSWEKKFDGGSSWGKKDDGGSSWGKKDDGGSLWGKKDDGGSSWGKEDDGGSLWGKKDDGESSWGKKDDGESSWGKKDDGGSSWGKKDEGGYSEQTFDRGGRGFGGRRGGGRRGGRDQFGRGSSFGNSEDPAPWSKPSGGSSWGKQDGDGGGSSWGKENDAGGGSSWGKQDNGVGSSWGKQNDGSGGGSSWGKQNDAGGGSSWGKQDSGGDGSSWGKQDGGGDSGSAWGKQNNTSGGSSWGKQSDAGGGSSWGKQDGGGGGSSWGKQDGGGGSGSAWGKQNETSNGSSWGKQNDSGGGSSWGKQDGGGGGSSWGKQNDGGGGSSWGKQGDGGSKPWNEHSGGGRGFGERRGGGGFRGGRNQSGRGGRSFDGGRSSSWKTDNQENTWKSDQSGGSDWKKGWGEDSNNSKPSGSSAGGCAGNWPSWDTNSKKETNDKPGDDSKSAWGTSNDQVNTDNNNDSWNKKPNNDVGTSGEADNAWGGKTNAVAPSPSGSAAWGTGDKKTGW

SEQ ID NO: 393 - protein, 238 aa, Artificial Sequence
  Synthetic Construct
KGGRAKLGTDYKDDDDKDYKDDDDKDYKDDDDKGSLEVLFQGPLEPYKCPECGKSFSQSGDLRRHQRTHTGEKPYKCPECGKSFSRSDHLTTHQRTHTGEKPYKCPECGKSFSQSSSLVRHQRTHTGEKPYKCPECGKSFSTSGNLVRHQRTHTGEKPYKCPECGKSFSQRANLRAHQRTHTGEKPYKCPECGKSFSRSDKLTEHQRTHTGLEGSMAGGLNDIFEAQKIEWHEDTGGS

SEQ ID NO: 394 - DNA, 726 bp, Artificial Sequence
  Synthetic Construct
tactccaaaaatgtcaaagatacagtctcagaagaccaaagggctattgagacttttcaacaaagggtaatttcgggaaacctcctcggattccattgcccagctatctgtcacttcatcgaaaggacagtagaaaaggaaggtggctcctacaaatgccatcattgcgataaaggaaaggctatcattcaagatgcctctgccgacagtggtcccaaagatggacccccacccacgaggagcatcgtggaaaaagaagacgttccaaccacgtcttcaaagcaagtggattgatgtgacatctccactgacgtaagggatgacgcacaatcccacccctactccaaaaatgtcaaagatacagtctcagaagaccaaagggctattgagacttttcaacaaagggtaatttcgggaaacctcctcggattccattgcccagctatctgtcacttcatcgaaaggacagtagaaaaggaaggtggctcctacaaatgccatcattgcgataaaggaaaggctatcattcaagatgcctctgccgacagtggtcccaaagatggacccccacccacgaggagcatcgtggaaaaagaagacgttccaaccacgtcttcaaagcaagtggattgatgtgacatctccactgacgtaagggatgacgcacaatcccactatccttcgcaagacccttcctctatataaggaagttcatttcatttggag

SEQ ID NO: 395 - DNA, 4203 bp, Artificial Sequence
  Synthetic Construct
atggcccctaagaagaagagaaaggtcggtattcacggcgttcctgcggcgatggacaagaagtatagtattggtctggccattgggacgaattccgttggctgggccgtgatcaccgatgagtacaaggtcccttccaagaagtttaaggttctggggaacaccgatcggcacagcatcaagaagaatctcattggagccctcctgttcgactcaggcgagaccgccgaagcaacaaggctcaagagaaccgcaaggagacggtatacaagaaggaagaataggatctgctacctgcaggagattttcagcaacgaaatggcgaaggtggacgattcgttctttcatagattggaggagagtttcctcgtcgaggaagataagaagcacgagaggcatcctatctttggcaacattgtcgacgaggttgcctatcacgaaaagtaccccacaatctatcatctgcggaagaagcttgtggactcgactgataaggcggaccttagattgatctacctcgctctggcacacatgattaagttcaggggccattttctgatcgagggggatcttaacccggacaatagcgatgtggacaagttgttcatccagctcgtccaaacctacaatcagctctttgaggaaaacccaattaatgcttcaggcgtcgacgccaaggcgatcctgtctgcacgcctttcaaagtctcgccggcttgagaacttgatcgctcaactcccgggcgaaaagaagaacggcttgttcgggaatctcattgcactttcgttggggctcacaccaaacttcaagagtaattttgatctcgctgaggacgcaaagctgcagctttccaaggacacttatgacgatgacctggataaccttttggcccaaatcggcgatcagtacgcggacttgttcctcgccgcgaagaatttgtcggacgcgatcctcctgagtgatattctccgcgtgaacaccgagattacaaaggccccgctctcggcgagtatgatcaagcgctatgacgagcaccatcaggatctgacccttttgaaggctttggtccggcagcaactcccagagaagtacaaggaaatcttctttgatcaatccaagaacggctacgctggttatattgacggcggggcatcgcaggaggaattctacaagtttatcaagccaattctggagaagatggatggcacagaggaactcctggtgaagctcaatagggaggaccttttgcggaagcaaagaactttcgataacggcagcatccctcaccagattcatctcggggagctgcacgccatcctgagaaggcaggaagacttctacccctttcttaaggataaccgggagaagatcgaaaagattctgacgttcagaattccgtactatgtcggaccactcgcccggggtaattccagatttgcgtggatgaccagaaagagcgaggaaaccatcacaccttggaacttcgaggaagtggtcgataagggcgcttccgcacagagcttcattgagcgcatgacaaattttgacaagaacctgcctaatgagaaggtccttcccaagcattccctcctgtacgagtatttcactgtttataacgaactcacgaaggtgaagtatgtgaccgagggaatgcgcaagcccgccttcctgagcggcgagcaaaagaaggcgatcgtggaccttttgtttaagaccaatcggaaggtcacagttaagcagctcaaggaggactacttcaagaagattgaatgcttcgattccgttgagatcagcggcgtggaagacaggtttaacgcgtcactggggacttaccacgatctcctgaagatcattaaggataaggacttcttggacaacgaggaaaatgaggatatcctcgaagacattgtcctgactcttacgttgtttgaggatagggaaatgatcgaggaacgcttgaagacgtatgcccatctcttcgatgacaaggttatgaagcagctcaagagaagaagatacaccggatggggaaggctgtcccgcaagcttatcaatggcattagagacaagcaatcagggaagacaatccttgactttttgaagtctgatggcttcgcgaacaggaattttatgcagctgattcacgatgactcacttactttcaaggaggatatccagaaggctcaagtgtcgggacaaggtgacagtctgcacgagcatatcgccaaccttgcgggatctcctgcaatcaagaagggtattctgcagacagtcaaggttgtggatgagcttgtgaaggtcatgggacggcataagcccgagaacatcgttattgagatggccagagaaaatcagaccacacaaaagggtcagaagaactcgagggagcgcatgaagcgcatcgaggaaggcattaaggagctggggagtcagatccttaaggagcacccggtggaaaacacgcagttgcaaaatgagaagctctatctgtactatctgcaaaatggcagggatatgtatgtggaccaggagttggatattaaccgcctctcggattacgacgtcgatgctatcgttcctcagtccttccttaaggatgacagcattgacaataaggttctcaccaggtccgacaagaaccgcgggaagtccgataatgtgcccagcgaggaagtcgttaagaagatgaagaactactggaggcaacttttgaatgccaagttgatcacacagaggaagtttgataacctcactaaggccgagcgcggaggtctcagcgaactggacaaggcgggcttcattaagcggcaactggttgagactagacagatcacgaagcacgtggcgcagattctcgattcacgcatgaacacgaagtacgatgagaatgacaagctgatccgggaagtgaaggtcatcaccttgaagtcaaagctcgtttctgacttcaggaaggatttccaattttataaggtgcgcgagatcaacaattatcaccatgctcatgacgcatacctcaacgctgtggtcggaacagcattgattaagaagtacccgaagctcgagtccgaattcgtgtacggtgactataaggtttacgatgtgcgcaagatgatcgccaagtcagagcaggaaattggcaaggccactgcgaagtatttcttttactctaacattatgaatttctttaagactgagatcacgctggctaatggcgaaatccggaagagaccacttattgagaccaacggcgagacaggggaaatcgtgtgggacaaggggagggatttcgccacagtccgcaaggttctctctatgcctcaagtgaatattgtcaagaagactgaagtccagacgggcgggttctcaaaggaatctattctgcccaagcggaactcggataagcttatcgccagaaagaaggactgggacccgaagaagtatggaggtttcgactcaccaacggtggcttactctgtcctggttgtggcaaaggtggagaagggaaagtcaaagaagctcaagtctgtcaaggagctcctgggtatcaccattatggagaggtccagcttcgaaaagaatccgatcgattttctcgaggcgaagggatataaggaagtgaagaaggacctgatcattaagcttccaaagtacagtcttttcgagttggaaaacggcaggaagcgcatgttggcttccgcaggagagctccagaagggtaacgagcttgctttgccgtccaagtatgtgaacttcctctatctggcatcccactacgagaagctcaagggcagcccagaggataacgaacagaagcaactgtttgtggagcaacacaagcattatcttgacgagatcattgaacagatttcggagttcagtaagcgcgtcatcctcgccgacgcgaatttggataaggttctctcagcctacaacaagcaccgggacaagcctatcagagagcaggcggaaaatatcattcatctcttcaccctgacaaaccttggggctcccgctgcattcaagtattttgacactacgattgatcggaagagatacacttctacgaaggaggtgctggatgcaacccttatccaccaatcgattactggcctctacgagacgcggatcgacttgagtcagctcgggggggataagagaccagcggcaaccaagaaggcaggacaagcgaagaagaagaag

SEQ ID NO: 396 - DNA, 30 bp, Artificial Sequence
  Synthetic Construct
tctagtggtcctcccccaggcaccggtatg

SEQ ID NO: 397 - DNA, 72 bp, Artificial Sequence
  Synthetic Construct
gattataaagacgatgacgataaagactacaaggatgacgatgacaaggattacaaagatgatgacgacaaa

SEQ ID NO: 398 - DNA, 305 bp, Artificial Sequence
  Synthetic Construct
tagaaatctcaaaattccggcagaacaattttgaatctcgatccgtagaaacgagacggtcattgttttagttccaccacgattatatttgaaatttacgtgagtgtgagtgagacttgcataagaaaataaaatctttagttgggaaaaaattcaataatataaatgggcttgagaaggaagcgagggataggcctttttctaaaataggcccatttaagctattaacaatcttcaaaagtaccacagcgcttaggtaaagaaagcagctgagtttatatatggttagagacgaagtagtgatt

SEQ ID NO: 399 - DNA, 20 bp, Artificial Sequence
  Synthetic Construct
gggtttttgcttttcgccat

SEQ ID NO: 400 - DNA, 83 bp, Artificial Sequence
  Synthetic Construct
gttttagagctagaaatagcaagttaaaataaggctagtccgttatcaacttgaaaaagtggcaccgagtcggtgcttttttt

SEQ ID NO: 401 - protein, 1390 aa, Artificial Sequence
  Synthetic Construct
MPKKKRKVGRGMDKKYSIGLAIGTNSVGWAVITDEYKVPSKKFKVLGNTDRHSIKKNLIGALLFDSGETAEATRLKRTARRRYTRRKNRICYLQEIFSNEMAKVDDSFFHRLEESFLVEEDKKHERHPIFGNIVDEVAYHEKYPTIYHLRKKLVDSTDKADLRLIYLALAHMIKFRGHFLIEGDLNPDNSDVDKLFIQLVQTYNQLFEENPINASGVDAKAILSARLSKSRRLENLIAQLPGEKKNGLFGNLIALSLGLTPNFKSNFDLAEDAKLQLSKDTYDDDLDNLLAQIGDQYADLFLAAKNLSDAILLSDILRVNTEITKAPLSASMIKRYDEHHQDLTLLKALVRQQLPEKYKEIFFDQSKNGYAGYIDGGASQEEFYKFIKPILEKMDGTEELLVKLNREDLLRKQRTFDNGSIPHQIHLGELHAILRRQEDFYPFLKDNREKIEKILTFRIPYYVGPLARGNSRFAWMTRKSEETITPWNFEEVVDKGASAQSFIERMTNFDKNLPNEKVLPKHSLLYEYFTVYNELTKVKYVTEGMRKPAFLSGEQKKAIVDLLFKTNRKVTVKQLKEDYFKKIECFDSVEISGVEDRFNASLGTYHDLLKIIKDKDFLDNEENEDILEDIVLTLTLFEDREMIEERLKTYAHLFDDKVMKQLKRRRYTGWGRLSRKLINGIRDKQSGKTILDFLKSDGFANRNFMQLIHDDSLTFKEDIQKAQVSGQGDSLHEHIANLAGSPAIKKGILQTVKVVDELVKVMGRHKPENIVIEMARENQTTQKGQKNSRERMKRIEEGIKELGSQILKEHPVENTQLQNEKLYLYYLQNGRDMYVDQELDINRLSDYDVAAIVPQSFLKDDSIDNKVLTRSDKARGKSDNVPSEEVVKKMKNYWRQLLNAKLITQRKFDNLTKAERGGLSELDKAGFIKRQLVETRQITKHVAQILDSRMNTKYDENDKLIREVKVITLKSKLVSDFRKDFQFYKVREINNYHHAHDAYLNAVVGTALIKKYPKLESEFVYGDYKVYDVRKMIAKSEQEIGKATAKYFFYSNIMNFFKTEITLANGEIRKRPLIETNGETGEIVWDKGRDFATVRKVLSMPQVNIVKKTEVQTGGFSKESILPKRNSDKLIARKKDWDPKKYGGFDSPTVAYSVLVVAKVEKGKSKKLKSVKELLGITIMERSSFEKNPIDFLEAKGYKEVKKDLIIKLPKYSLFELENGRKRMLASAGELQKGNELALPSKYVNFLYLASHYEKLKGSPEDNEQKQLFVEQHKHYLDEIIEQISEFSKRVILADANLDKVLSAYNKHRDKPIREQAENIIHLFTLTNLGAPAAFKYFDTTIDRKRYTSTKEVLDATLIHQSITGLYETRIDLSQLGGDSRADPKKKRKV

SEQ ID NO: 402 - protein, 1139 aa, Artificial Sequence
  Synthetic Construct
MPKKKRKVSDLVLGLAIGIGSVGVGILNKVTGEIIHKNSRIFPAAQAENNLVRRTNRQGRRLARRKKHRRVRLNRLFEESGLITDFTKISINLNPYQLRVKGLTDELSNEELFIALKNMVKHRGISYLDDASDDGNSSVGDYAQIVKENSKQLETKTPGQIQLERYQTYGQLRGDFTVEKDGKKHRLINVFPTSAYRSEALRILQTQQEFNPQITDEFINRYLEILTGKRKYYHGPGNEKSRTDYGRYRTSGETLDNIFGILIGKCTFYPDEFRAAKASYTAQEFNLLNDLNNLTVPTETKKLSKEQKNQIINYVKNEKAMGPAKLFKYIAKLLSCDVADIKGYRIDKSGKAEIHTFEAYRKMKTLETLDIEQMDRETLDKLAYVLTLNTEREGIQEALEHEFADGSFSQKQVDELVQFRKANSSIFGKGWHNFSVKLMMELIPELYETSEEQMTILTRLGKQKTTSSSNKTKYIDEKLLTEEIYNPVVAKSVRQAIKIVNAAIKEYGDFDNIVIEMARETNEDDEKKAIQKIQKANKDEKDAAMLKAANQYNGKAELPHSVFHGHKQLATKIRLWHQQGERCLYTGKTISIHDLINNSNQFEVAAILPLSITFDDSLANKVLVYATAAQEKGQRTPYQALDSMDDAWSFRELKAFVRESKTLSNKKKEYLLTEEDISKFDVRKKFIERNLVDTRYASRVVLNALQEHFRAHKIDTKVSVVRGQFTSQLRRHWGIEKTRDTYHHHAVDALIIAASSQLNLWKKQKNTLVSYSEDQLLDIETGELISDDEYKESVFKAPYQHFVDTLKSKEFEDSILFSYQVDSKFNRKISDATIYATRQAKVGKDKADETYVLGKIKDIYTQDGYDAFMKIYKKDKSKFLMYRHDPQTFEKVIEPILENYPNKQINDKGKEVPCNPFLKYKEEHGYIRKYSKKGNGPEIKSLKYYDSKLGNHIDITPKDSNNKVVLQSVSPWRADVYFNKTTGKYEILGLKYADLQFDKGTGTYKISQEKYNDIKKKEGVDSDSEFKFTLYKNDLLLVKDTETKEQQLFRFLSRTMPKQKHYVELKPYDKQKFEGGEALIKVLGNVANSGQCKKGLGKSNISIYKVRTDVLGNQHIIKNEGDKPKLDFSRADPKKKRKV

SEQ ID NO: 403 - protein, 1100 aa, Artificial Sequence
  Synthetic Construct
MPKKKRKVAAFKPNPINYILGLAIGIASVGWAMVEIDEDENPICLIDLGVRVFERAEVPKTGDSLAMARRLARSVRRLTRRRAHRLLRARRLLKREGVLQAADFDENGLIKSLPNTPWQLRAAALDRKLTPLEWSAVLLHLIKHRGYLSQRKNEGETADKELGALLKGVADNAHALQTGDFRTPAELALNKFEKESGHIRNQRGDYSHTFSRKDLQAELILLFEKQKEFGNPHVSGGLKEGIETLLMTQRPALSGDAVQKMLGHCTFEPAEPKAAKNTYTAERFIWLTKLNNLRILEQGSERPLTDTERATLMDEPYRKSKLTYAQARKLLGLEDTAFFKGLRYGKDNAEASTLMEMKAYHAISRALEKEGLKDKKSPLNLSPELQDEIGTAFSLFKTDEDITGRLKDRIQPEILEALLKHISFDKFVQISLKALRRIVPLMEQGKRYDEACAEIYGDHYGKKNTEEKIYLPPIPADEIRNPVVLRALSQARKVINGVVRRYGSPARIHIETAREVGKSFKDRKEIEKRQEENRKDREKAAAKFREYFPNFVGEPKSKDILKLRLYEQQHGKCLYSGKEINLGRLNEKGYVEIAAALPFSRTWDDSFNNKVLVLGSEAQNKGNQTPYEYFNGKDNSREWQEFKARVETSRFPRSKKQRILLQKFDEDGFKERNLNDTRYVNRFLCQFVADRMRLTGKGKKRVFASNGQITNLLRGFWGLRKVRAENDRHHALDAVVVACSTVAMQQKITRFVRYKEMNAFDGKTIDKETGEVLHQKTHFPQPWEFFAQEVMIRVFGKPDGKPEFEEADTPEKLRTLLAEKLSSRPEAVHEYVTPLFVSRAPNRKMSGQGHMETVKSAKRLDEGVSVLRVPLTQLKLKDLEKMVNREREPKLYEALKARLEAHKDDPAKAFAEPFYKYDKAGNRTQQVKAVRVEQVQKTGVWVRNHNGIADNATMVRVDVFEKGDKYYLVPIYSWQVAKGILPDRAVVQGKDEEDWQLIDDSFNFKFSLHPNDLVEVITKKARMFGYFASCHRGTGNINIRIHDLDHKIGKNGILEGIGVKTALSFQKYQIDELGKEIRPCRLKKRPPVRSRADPKKKRKV

SEQ ID NO: 404 - DNA, 102 bp, Artificial Sequence
  Synthetic Construct
  misc_feature 1, 2, 3, 4, 5, 6, 7, 8, 9, 10, 11, 12, 13, 14, 15, 16, 17,18, 19, 20: n = A,T,C or G
nnnnnnnnnnnnnnnnnnnngttttagagctagaaatagcaagttaaaataaggctagtccgttatcaacttgaaaaagtggcaccgagtcggtgctttttt

SEQ ID NO: 405 - DNA, 110 bp, Artificial Sequence
  Synthetic Construct
  misc_feature 1, 2, 3, 4, 5, 6, 7, 8, 9, 10, 11, 12, 13, 14, 15, 16, 17,18, 19, 20: n = A,T,C or G
nnnnnnnnnnnnnnnnnnnngtttttgtactctcagaaatgcagaagctacaaagataaggcttcatgccgaaatcaacaccctgtcattttatggcagggtgttttttt

SEQ ID NO: 406 - DNA, 128 bp, Artificial Sequence
  Synthetic Construct
  misc_feature 1, 2, 3, 4, 5, 6, 7, 8, 9, 10, 11, 12, 13, 14, 15, 16, 17,18, 19, 20: n = A,T,C or G
nnnnnnnnnnnnnnnnnnnngttgtagctccctttctcgaaagagaaccgttgctacaataaggccgtctgaaaagatgtgccgcaacgctctgccccttaaagcttctgctttaacgggcttttttt

SEQ ID NO: 407 - protein, 130 aa, Artificial Sequence
  Synthetic Construct
MASNFTQFVLVDNGGTGDVTVAPSNFANGVAEWISSNSRSQAYKVTCSVRQSSAQKRKYTIKVEVPKVATQTVGGVELPVAAWRSYLNMELTIPIFATNSDCELIVKAMQGLLKDGNPIPSAIAANSGIY

SEQ ID NO: 408 - protein, 247 aa, Artificial Sequence
  Synthetic Construct
MGPDIVMTQSPSSLSASVGDRVTITCRSSTGAVTTSNYASWVQEKPGKLFKGLIGGTNNRAPGVPSRFSGSLIGDKATLTISSLQPEDFATYFCALWYSNHWVFGQGTKVELKRGGGGSGGGGSGGGGSSGGGSEVKLLESGGGLVQPGGSLKLSCAVSGFSLTDYGVNWVRQAPGRGLEWIGVIWGDGITDYNSALKDRFIISKDNGKNTVYLQMSKVRSDDTALYYCVTGLFDYWGQGTLVTVSS

SEQ ID NO: 409 - DNA, 123 bp, Artificial Sequence
  Synthetic Construct
ctcgagatgggatacccatacgacgtcccagactacgcgggaatgggatacccatacgacgtcccagactacgctggaatgggatacccatacgacgtcccagactacgctggaatggtaccg

SEQ ID NO: 410 - protein, 35 aa, Artificial Sequence
  Synthetic Construct
GYPYDVPDYAGMGYPYDVPDYAGMGYPYDVPDYAG

SEQ ID NO: 411 - protein, 9 aa, Artificial Sequence
  Synthetic Construct
SSGPPPGTG

SEQ ID NO: 412 - protein, 27 aa, Artificial Sequence
  Synthetic Construct
MDYKDDDDKDYKDDDDKDYKDDDDKGS

SEQ ID NO: 413 - DNA, 14621 bp, Artificial Sequence
  Synthetic Construct
  misc_feature 157, 158, 159, 160, 161, 162, 163, 164, 165, 166, 167, 168,169, 170, 171, 172, 173, 174, 175, 176: n = A,T,C or G
ggtttcagaattcaaaaaaagcaccgactcggtgccacttggccctgcagacatgggtgatcctcatgttggccaagttgataacggactagccttattttaacttgctaggccctgcagacatgggtgatcctcatgttggcctagctctaaaacnnnnnnnnnnnnnnnnnnnncaatcactacttcgactctagctgtatataaactcagcttcgttttcttatctaagcgatgtgggacttttgaagattgttttcaacttaaatgggcctatataagaaatactattgttctttcccatataaatgggcctgcttctcttctttcagattcccaggggccttttgaagattatcttcatatcttaagaatgaagatgttttattcaatcaaattcttgaaggttcgatgcctaatcattctaatcctgggacaaactatgaaacaagatacaaaaactccgaatggaaagttaaaaagaagaaaacgaaagctacggttcaagaaaatgtaagctgataaacaaaaaaaaactgtatgaacgaagaagaagaaaaaaagctaagaagaaatgatgtattgtgcggaaggcaagtcgagtttccgttgttcaacgaaagcttaaacctcgtcgcaaaattcgccctggacccgcccaacgatttgtcgtcactgtcaaggtttgacctgcacttcatttggggcccacatacaccaaaaaaatgctgcataattctcggggcagcaagtcggttacccggccgccgtgctggaccgggttgaatggtgcccgtaactttcggtagagcggacggccaatactcaacttcaaggaatctcacccatgcgcgccggcggggaaccggagttcccttcagtgagcgttattagttcgccgctcggtgtgtcgtagatactagcccctggggcacttttgaaatttgaataagatttatgtaatcagtcttttaggtttgaccggttctgccgctttttttaaaattggatttgtaataataaaacgcaattgtttgttattgtggcgctctatcatagatgtcgctataaacctattcagcacaatatattgttttcattttaatattgtacatataagtagtagggtacaatcagtaaattgaacggagaatattattcataaaaatacgatagtaacgggtgatatattcattagaatgaaccgaaaccggcggtaaggatctgagctacacatgctcaggttttttacaacgtgcacaacagaattgaaagcaaatatcatgcgatcataggcgtctcgcatatctcattaaagcaggactctagggactagtcccgggtcttaattaactctctagactcacctaggagctccaccgcggtggcggccgctctagaactagttaattaagaattatcgaaccactttgtacaagaaagctgggcccatgaggcctcatctgggtgtgttcattggctgattagtgcatgaactctgagccaagcatcgaacaaattcttctttcttcttgccaaagttgaagacggcatgctcacggagcacttgctcccgcttaatgtcctccagcgttttctcctttttccatttcagctctttcattttcttctccgcctcactatagttgtccatcgtgcgagaagcagttggctttgcaaatctcacgttcacctcatcacggtttccaagattgaagatccccgttttcctgatgattcctccatccaaagataccgcaccatcacttatgcatgggagggcactaatcatatcggcccttgttttgtaaacttgaaggcgagagaatagattgtagaacaaggtctcacgaagaccatatccatatgatgtgacacagagcaagtaagctggatcgatctgtatcatattcactgcaaatccgagaaacccgggaggacactcaccattaggtaattttggtttcagaagatcaagccttctttgcagatcatcagctatgtgctgaccaacatacggcctcaggttttcaaggcagatggcatcaaaactgtctccaatctctcttccaatcgaagagccaaggcaatgaaggccagcatttatatcaatgttgccatggttatcataagcctctaaagccgtaacactttcataattcctgcatacaactgccaacattgagcgagtccccaaataattcgacaaaatctggctgagattttcatcattgaccttcccaagtttcgctacaacaccaacaacaccttttgtcaacatcaactgagaagcttgagcaccatgaagagtctcaaccagacttaaaactccagcagctgagttttcgtggcgaaggatctgtgcattgatatcttcaccctgaagactgttatcagagttttcacttctaggagtaggagacgagttaagcttactcatatgaacttgcaagtcgacgatagcttcatccattttgtttttctgagacttgagaaacttgagattatcctcatgctgtttgattttgttacccatagcttcaagatcagattcaagcctcttggaattgaacatagcaaactcagcgtgagcaatgcctcctccattctgagtttcatttcttgcaactggtgaagattgatccaaattcatcatccttgttggatcttgaacattcaacggagtggtctgaaacgaaatctgttgaccagtcggatacatggttatatctccttctggccttgacggcccttcagcttttttgtacaaacttgtttgatagcttggcgcgcccttgtcatcgtcatccttgtagtctttatcgtcatcgtctttataatccgccaccttcctctttttcttaggtccgctacctcctcctccgcttcctcctcctccgcttccacctcctccagcgctgtagatacctgagttagcggcgatggcggaagggataggattaccgtctttgaggagcccctgcattgccttcacgatgagttcacagtcagaattggtagcgaaaattgggatagtgagctccatgttcaggtaggacctccaagcggcgacaggcagttcgactccgcccactgtctgggtagccactttggggacctccaccttgatggtatactttctcttctgggcactagactgcctgacgctgcatgtcaccttgtaggcctggctccgtgagttggagctgatccactctgccaccccattagcgaaattagaaggagccactgtcacatcccctgtcccaccattgtccacgagcacgaactgagtaaagtttgaagccatctgttaatcagaaaaactcagattaatcgacaaattcgatcgcacaaactagaaactaacaccagatctagatagaaatcacaaatcgaagagtaattattcgacaaaactcaaattatttgaacaaatcggatgatatctatgaaaccctaatcgagaattaagatgatatctaacgatcaaacccagaaaatcgtcttcgatctaagattaacagaatctaaaccaaagaacatatacgaaattgggatcgaacgaaaacaaaatcgaagattttgagagaataaggaacacagaaatttaccttgatcacggtagagagaattgagagaaagtttttaagattttgagaaattgaaatctgaattgtgaagaagaagagctctttgggtattgttttatagaagaagaagaagaaaagacgaggacgactaggtcacgagaaagctaaggcggtgaagcaatagctaataataaaatgacacgtgtattgagcgttgtttacacgcaaagttgtttttggctaattgccttatttttaggttgaggaaaagtatttgtgctttgagttgataaacacgactcgtgtgtgccggctgcaaccactttgacgccgtttattactgactcgtcgacaaccacaatttctaacggtcgtcataagatccagccgttgagatttaacgatcgttacgatttatatttttttagcattatcgttttattttttaaatatacggtggagctgaaaattggcaataattgaaccgtgggtcccactgcattgaagcgtatttcgtattttctagaattcttcgtgctttatttcttttcctttttgtttttttttgccatttatctaatgcaagtgggcttataaaatcagtgaatttcttggaaaagtaacttctttatcgtataacatattgtgaaattatccatttcttttaattttttagtgttattggatatttttgtatgattattgatttgcataggataatgacttttgtatcaagttggtgaacaagtctcgttaaaaaaggcaagtggtttggtgactcgatttattcttgttatttaattcatatatcaatggatcttatttggggcctggtccatatttaacactcgtgttcagtccaatgaccaataatattttttcattaataacaatgtaacaagaatgatacacaaaacattctttgaataagttcgctatgaagaagggaacttatccggtcctagatcatcagttcatacaaacctccatagagttcaacatcttaaacaagaatatcctgatctgaagaatgtggaggctttagtcccttggatacttgggaggctgtggaagaacagaaacgagctggtgcttaaagggagggaatttggaaccaatgaggtattagtaaggacacaagaagatgcagatgagtggattagaaggaaagaggctcagaatgtaaggaaagcaccaaccacaacaccgtcgggacagacgagaaacatgggaagctccaccacaatcttgggttaagtgcaactttgatggggcatggccaacagaaggattaaaatgtggcttagggtgggtgcttcgcgatcatacagggaaggtgttatggttaggtgcaagagctgtggtaaaagtaagaagcgtgctggaagtagaagtggaggctcttagatgggctgtgctgtcattatcccgattcaattataggaagatcatttttgaggtggattctcagcaacttgtgtctttggttacatgaaagttatgcttgtcaagtctcaatccaattatccaagacataaagtatctacttagcaagtttgaggattttatgcttgtgcatacaagccgagaaggaaatggagtggcagatagaatagctaaggaatctctttcttttgagaattatgatctaaagttgtattctattgtaccaatttgggttaaaagctctgttgagctagactacgcaaacaagttgtaatgagttgctggcctctcttgggattgttcatcaaagtagctgtccctacacaccacaacagaatggtgttgtggagagaaagcacagacacatccttgagatggcaagggcacttaagtttcagagtggtgtacctaccaggttttggggagactgtgtcaagactgttgtatacctgatcaatagactccctactccaatcttacaaggcaaatgtccatatgaactactctatcagaaacatgccaagcttgatcacttgagagtgtttgggtgtcttgcttttgcagcaacactgcccaaaggtgacaaacttgcacctagagccaagcgaaccatcttcattggttattctgagactcaaaagggttacaggttgtatgacttggataataaggtgatcatagtgagcagggatgtagttttcagagagtttcagttccctttcaaagagtccatctcccatgaacctgatatgttcactcgagcaggttcacttagctctgaagatacagctttgcagctagtgtataatgatatttttccttccagctttcatactgatgatgatgatactccagttcttattcctgacattgtagaggccaatgaggatatcactttggggactcattctacccaaaatcatatcacttcagctgatgctgcaccttcaggccacctgcatgctcctgcagagtcagttgagtcagctgagcctgacctagcaaatgctgaatttgagcaccatactgctgtagctgatccctctctagttccagcaaacctgcacactagacctaaacgcaatgcaggtcctcccatctggctcaaggactttgtgacactgaacaaaggctctagggatgttccataccctatagccaactatgtttcctatgatcacttgcctgttcactatcaagcttatttgagtgctttctccacttatactgaacctaaatccttcaaagaagcagctcaagatgagaaatggatggaggccatgtcccttgagatacaggctcttgaggataataacacctgggagattgtccctttaccccctggtaaacagcctatagggtccaaatgggtgtacaaaattaaatacaaagctaatggtgaagttgacaggtttaaggcaaggctagtggccaagggatacactcagcaagaaggccttgactaccatgaaactttttctccagtggccaaaatggtcactgtaaaagctgtcatatctgttgctgcttccaagggctggttccttttccagatggatgtcaacaatgcttttctacaaggtgacctcatggaagaagtttatatgtctctgcctcagggttttcacagccaaggggagaccaaagtgtgcaggctgttgaatccctctatggtttaaagcaagcatcaaggcagtggaacatcaagcttaccactgtccttatgcaggctggttttatgcaaagtgcttatgatcactccttgtttaccaaaagagaggggactgaccttgtcataatcctgatttatgtggatgatctgttaataacaggcagcagcaatgttttgatttcagaagcaaaggcaaccctgcatcagcatttcaagatgaaagatttgggagaactaaaatacttcttaggcattgaggtgctgagatcagaaaagggaatcctactgaaccagaggaagtatgcactggaactgatatcaggtgttggtctgggaggctgcagaccagtgtcaaccccaatggaacagaaccaaaggctgactactgtagaatatgacaagcacttaggaaagactgatgatgcagagttagaggatgtgggttcctatcagagactggtgggaaagcttctctacttgacaatcacaaggccagatatcagctttgcagtgcaggtgctgagtcaattcatgcagcaacccaaacagtcacacctggaagcagcattgagggttgtgaagtacataaaaggttctccaggtgttaggaagcggccgcatgcatatgagtctagctcaacagagcttttaacccaaattggtacaatagaatacaactttagatcataattctcaaaagaaagagattccttagctattctatctgccactccatttccttctcggcttgtatgcacaagcataaaatcctcaaacttgctaagtagatactttatgtcttggataattggattgagacttgacaagcataactttcatgtaaccaaagacacaagttgctgagaatccacctcaaaaatgatcttcctataattgaatcgggataatgacagcacagcccatctaagagcctccacttctacttccagcacgcttcttacttttaccacagctcttgcacctaaccataacaccttccctgtatgatcgcgaagcacccaccctaagccacattttaatccttctgttggccatgccccatcaaagttgcacttaacccaagattgtggtggagcttcccatgtttctcgtctgtcccgacggtgttgtggttggtgctttccttacattctgagcctctttccttctaatccactcatctgcatcttcttgtgtccttactaatacctcattggttccaaattccctccctttaagcaccagctcgtttctgttcttccacagcctcccaagtatccaagggactaaagcctccacattcttcagatcaggatattcttgtttaagatgttgaactctatggaggtttgtatgaactgatgatctaggaccggataagttcccttcttcatagcgaacttattcaaagaatgttttgtgtatcattcttgttacattgttattaatgaaaaaatattattggtcattggactgaacacgagtgttaaatatggaccaggccccaaataagatccattgatatatgaattaaataacaagaataaatcgagtcaccaaaccacttgccttttttaacgagacttgttcaccaacttgatacaaaagtcattatcctatgcaaatcaataatcatacaaaaatatccaataacactaaaaaattaaaagaaatggataatttcacaatatgttatacgataaagaagttacttttccaagaaattcactgattttataagcccacttgcattagataaatggcaaaaaaaaacaaaaaggaaaagaaataaagcacgaagaattctagaaaatacgaaatacgcttcaatgcagtgggacccacggttcaattattgccaattttcagctccaccgtatatttaaaaaataaaacgataatgctaaaaaaatataaatcgtaacgatcgttaaatctcaacggctggatcttatgacgaccgttagaaattgtggttgtcgacgagtcagtaataaacggcgtcaaagtggttgcagccggcacacacgagtcgtgtttatcaactcaaagcacaaatacttttcctcaacctaaaaataaggcaattagccaaaaacaactttgcgtgtaaacaacgctcaatacacgtgtcattttattattagctattgcttcaccgccttagctttctcgtgacctagtcgtcctcgtcttttcttcttcttcttctataaaacaatacccaaagagctcttcttcttcacaattcagatttcaatttctcaaaatcttaaaaactttctctcaattctctctaccgtgatcaaggtaaatttctgtgttccttattctctcaaaatcttcgattttgttttcgttcgatcccaatttcgtatatgttctttggtttagattctgttaatcttagatcgaagacgattttctgggtttgatcgttagatatcatcttaattctcgattagggtttcatagatatcatccgatttgttcaaataatttgagttttgtcgaataattactcttcgatttgtgatttctatctagatctggtgttagtttctagtttgtgcgatcgaatttgtcgattaatctgagtttttctgattaacagggatcatcaacaagtttgtacaaaaaagcaggctctttaaagtatttttacaacaattaccaacaacaacaaacaacaaacaacattacaattactatttacaattacaaaaaaagttaacatggacaaaaaatacagcattgggttggacattgggacaaatagcgtgggttgggcagtcattacagacgaatacaaggttcctagcaagaagttcaaggtgttgggcaacactgacaggcactcgatcaagaaaaatctcattggtgcactccttttcgatagtggggagactgccgaagcgaccagactgaaaaggactgctagaaggcgctatacccggcgtaagaatcgcatttgctacctccaggagatattctctaacgaaatggccaaggttgatgacagcttctttcatcgcttggaggaatcattcctcgtcgaggaagacaagaaacacgagcggcatccgatctttggaaacattgttgatgaggtcgcatatcacgaaaagtaccccacgatctaccatcttcgcaagaaactggtggattcaactgacaaggctgatctgcggttgatatacctcgcacttgctcacatgatcaagttccgtggccattttcttattgagggagacctgaaccctgataattctgacgtcgataagttgttcatccagctcgtgcaaacatacaatcagctctttgaggaaaaccctatcaacgcctctggagttgatgccaaagcgatcctttccgcgaggctgtcgaagagtagaaggctggagaacttgatcgcccaacttcctggcgaaaagaaaaacggtttgttcgggaatctcattgcgctgagcttgggactcacgccaaacttcaagtctaacttcgacctcgcagaggatgctaaacttcagctgtccaaggatacttatgatgacgatcttgacaacctgttggcacaaatcggtgaccagtacgctgatttgttcctcgctgccaagaacctcagcgatgccatactcctttcagacatcctccgcgtgaacactgagattaccaaagcacctctgtctgcttccatgataaagcgttatgatgagcaccatcaagacctcactctgttgaaggcgttggttagacagcaactcccagagaagtacaaagaaatcttctttgaccaatctaagaatggctacgccggatatattgatggcggagcgtcccaggaggagttctacaagtttatcaaacctattcttgagaagatggatggtacggaggaactccttgttaaactgaatagagaggatctcttgcgcaagcaacggactttcgacaacggcagcataccgcaccagatccatctcggagagcttcacgccatccttcgccggcaggaagatttctacccctttctgaaggacaaccgtgagaagatcgaaaaaatccttactttcagaatcccttactatgtcggtccactggctagaggcaactctagatttgcttggatgacacgcaagagtgaggaaactatcaccccttggaacttcgaggaagtggttgacaagggcgcatcggctcaaagtttcattgagagaatgactaattttgataagaaccttccgaacgagaaagtcctgcccaagcattcactcctttacgagtatttcacagtgtataacgaacttacgaaggtgaaatacgttactgagggtatgcggaagccggcattcctgtcgggggaacaaaagaaagctatagtggatctgttgttcaaaactaacaggaaggttaccgtcaagcagcttaaggaggattacttcaagaaaatagaatgttttgactcggtggagatcagtggcgttgaagatagattcaacgcttcactgggaacctaccacgacctccttaagatcattaaggacaaagatttcttggataacgaggaaaatgaggacattctcgaagatatagtccttacactgacgttgtttgaggaccgtgaaatgatcgaggaaagattgaagacctatgctcatctcttcgacgataaggttatgaagcagctcaagcgtagaaggtacacaggttgggggcgtctttctagaaagctgattaatggcataagggataaacaatctggaaagacgattctggatttcctcaagtccgacggcttcgccaaccgcaattttatgcagcttatacacgacgattccctgactttcaaagaggacatccagaaggcccaagttagcggccaaggagattcacttcacgagcatatcgccaacctggcgggtagcccggcgatcaagaaagggattcttcagaccgtcaaggtcgtggatgagctggtgaaagttatgggccggcataagcccgaaaacatagtgatcgagatggcccgtgaaaatcagactacccaaaaaggacagaagaactcccgcgagcggatgaaaaggatagaggaaggcatcaaggaacttggaagccagatcctgaaggagcacccagttgaaaacacacagttgcaaaatgagaagctctatctttactatctccaaaatggtagagacatgtatgtggatcaggagttggacattaacaggctctcagactacgatgtcgaccatatcgtgccgcaatcgttccttaaggacgatagtatagataataaggtgctgactcggtcggataaaaaccgtggcaagtcggacaatgttcccagtgaggaagttgtgaagaagatgaagaactactggcgccaactgttgaatgcaaaattgatcacccagaggaagtttgacaacctcacaaaagcagagcgcggtgggctcagtgaacttgataaagctggattcattaagaggcaacttgttgagacacgccagattacgaagcacgtcgcgcagatactggattctaggatgaacaccaagtacgacgagaatgataaattgatcagagaagtgaaggttatcacattgaagtctaaactcgtgtccgattttcgcaaagacttccaattttataaggttcgggagatcaacaattatcaccatgcacatgatgcttacctcaacgccgtggttggtacggcgttgattaagaaatacccgaagctggagtctgagttcgtgtacggggattataaggtctacgacgtgaggaaaatgatcgctaagagtgagcaggaaattggtaaagccaccgcgaagtatttcttttactctaacatcatgaacttcttcaagacagagataacgttggcaaatggtgaaatacgtaagagacctctcatcgagactaacggtgaaaccggggaaatcgtttgggataaagggcgggactttgctactgttcgtaaggtcctctccatgccgcaagtgaatattgttaagaaaacagaggtccagacgggcggattctctaaggaatccatccttcccaaaagaaacagcgacaagctgattgcgaggaagaaagattgggaccctaagaaatatggtgggttcgattctccaaccgttgcctactccgtcttggtcgtggcgaaggttgagaagggtaaatctaagaaactcaaatccgtcaaggaactccttgggattactatcatggagaggtcttccttcgaaaagaatcctatcgatttccttgaggctaaaggctataaggaagtgaagaaggatctcatcatcaagctcccaaagtacagcctgtttgagttggaaaacggaaggaagcgcatgttggcatcagctggagagctccagaaagggaacgagctggccttgccttctaagtatgtgaacttcctctatcttgcgtcgcactacgagaagctgaaaggcagtccagaggacaacgaacagaaacaactttttgttgagcaacacaagcattatctggatgagattatagaacagatcagcgagttctcaaaaagagtcattcttgccgatgctaacctcgacaaggtgctctccgcatacaacaaacacagagacaagccgatcagggagcaggctgaaaatatcattcatctcttcactcttaccaacctgggtgcccccgcggcattcaagtattttgatacaacgattgaccggaaacgttacacaagcacgaaggaggtccttgatgcgaccctgattcatcaaagcataacagggctctatgagacgagaatcgatttgtcacagctcggcggagactacccgtatgacgtgcccgattacgctgccgcggcagctgagttcaagcgcgaggaacaggcccggaaggcgaaagtgaacaatgagaagaaaacagaaatcgttaaacctgagagctgctcaaacgagggagacgttaaggatcttaagaggaaagactctgaggatggcaacgaaggagaggaagaggaagctagctcaaaacctaagaaaccaaaggtggcactctcacatctccaagacattgacgacaccgaagcagaccaagaagaagaacccgggggcgcgccatgataactagagtcctgctttaatgagatatgcgagacgcctatgatcgcatgatatttgctttcaattctgttgtgcacgttgtaaaaaacctgagcatgtgtagctcagatccttaccgccggtttcggttcattctaatgaatatatcacccgttactatcgtatttttatgaataatattctccgttcaatttactgattgtaccctactacttatatgtacaatattaaaatgaaaacaatatattgtgctgaataggtttatagcgacatctatgatagagcgccacaataacaaacaattgcgttttattattacaaatccaattttaaaaaaagcggcagaaccggtcaaacctaaaagactgattacataaatcttattcaaatttcaaaagtgccccaggggctagtatctacgacacaccgagcggcgaactaataacgctcactgaagggaactccggttccccgccggcgcgcatgggtgagattccttgaagttgagtattggccgtccgctctaccgaaagttacgggcaccattcaacccggtccagcacggcggccgggtaaccgacttgctgccccgagaattatgcagcatttttttggtgtatgtgggccccaaatgaagtgcaggtcaaaccttgacagtgacgacaaatcgttgggcgggtccagggcgaattttgcgacaacatgtcgaggctcagcaggaccggcatgcaagctagcttactagtgatattctatagtgtcacctaaatctgcggc

SEQ ID NO: 414 - DNA, 163 bp, Artificial Sequence
  Synthetic Construct
  misc_feature 144, 145, 146, 147, 148, 149, 150, 151, 152, 153, 154, 155,156, 157, 158, 159, 160, 161, 162, 163: n = A,T,C or G
aaaaaaagcaccgactcggtgccacttggccctgcagacatgggtgatcctcatgttggccaagttgataacggactagccttattttaacttgctaggccctgcagacatgggtgatcctcatgttggcctagctctaaaacnnnnnnnnnnnnnnnnnnnn

SEQ ID NO: 415 - DNA, 450 bp, Artificial Sequence
  Synthetic Construct
caatcactacttcgactctagctgtatataaactcagcttcgttttcttatctaagcgatgtgggacttttgaagattgttttcaacttaaatgggcctatataagaaatactattgttctttcccatataaatgggcctgcttctcttctttcagattcccaggggccttttgaagattatcttcatatcttaagaatgaagatgttttattcaatcaaattcttgaaggttcgatgcctaatcattctaatcctgggacaaactatgaaacaagatacaaaaactccgaatggaaagttaaaaagaagaaaacgaaagctacggttcaagaaaatgtaagctgataaacaaaaaaaaactgtatgaacgaagaagaagaaaaaaagctaagaagaaatgatgtattgtgcggaaggcaagtcgagtttccgttgttcaacgaaagctt

SEQ ID NO: 416 - DNA, 746 bp, Artificial Sequence
  Synthetic Construct
aaacctcgtcgcaaaattcgccctggacccgcccaacgatttgtcgtcactgtcaaggtttgacctgcacttcatttggggcccacatacaccaaaaaaatgctgcataattctcggggcagcaagtcggttacccggccgccgtgctggaccgggttgaatggtgcccgtaactttcggtagagcggacggccaatactcaacttcaaggaatctcacccatgcgcgccggcggggaaccggagttcccttcagtgagcgttattagttcgccgctcggtgtgtcgtagatactagcccctggggcacttttgaaatttgaataagatttatgtaatcagtcttttaggtttgaccggttctgccgctttttttaaaattggatttgtaataataaaacgcaattgtttgttattgtggcgctctatcatagatgtcgctataaacctattcagcacaatatattgttttcattttaatattgtacatataagtagtagggtacaatcagtaaattgaacggagaatattattcataaaaatacgatagtaacgggtgatatattcattagaatgaaccgaaaccggcggtaaggatctgagctacacatgctcaggttttttacaacgtgcacaacagaattgaaagcaaatatcatgcgatcataggcgtctcgcatatctcattaaagcaggactctagggactagtcccgggtcttaattaactctctagactcacctagg

SEQ ID NO: 417 - DNA, 1990 bp, Artificial Sequence
  Synthetic Construct
ctgttaatcagaaaaactcagattaatcgacaaattcgatcgcacaaactagaaactaacaccagatctagatagaaatcacaaatcgaagagtaattattcgacaaaactcaaattatttgaacaaatcggatgatatctatgaaaccctaatcgagaattaagatgatatctaacgatcaaacccagaaaatcgtcttcgatctaagattaacagaatctaaaccaaagaacatatacgaaattgggatcgaacgaaaacaaaatcgaagattttgagagaataaggaacacagaaatttaccttgatcacggtagagagaattgagagaaagtttttaagattttgagaaattgaaatctgaattgtgaagaagaagagctctttgggtattgttttatagaagaagaagaagaaaagacgaggacgactaggtcacgagaaagctaaggcggtgaagcaatagctaataataaaatgacacgtgtattgagcgttgtttacacgcaaagttgtttttggctaattgccttatttttaggttgaggaaaagtatttgtgctttgagttgataaacacgactcgtgtgtgccggctgcaaccactttgacgccgtttattactgactcgtcgacaaccacaatttctaacggtcgtcataagatccagccgttgagatttaacgatcgttacgatttatatttttttagcattatcgttttattttttaaatatacggtggagctgaaaattggcaataattgaaccgtgggtcccactgcattgaagcgtatttcgtattttctagaattcttcgtgctttatttcttttcctttttgtttttttttgccatttatctaatgcaagtgggcttataaaatcagtgaatttcttggaaaagtaacttctttatcgtataacatattgtgaaattatccatttcttttaattttttagtgttattggatatttttgtatgattattgatttgcataggataatgacttttgtatcaagttggtgaacaagtctcgttaaaaaaggcaagtggtttggtgactcgatttattcttgttatttaattcatatatcaatggatcttatttggggcctggtccatatttaacactcgtgttcagtccaatgaccaataatattttttcattaataacaatgtaacaagaatgatacacaaaacattctttgaataagttcgctatgaagaagggaacttatccggtcctagatcatcagttcatacaaacctccatagagttcaacatcttaaacaagaatatcctgatctgaagaatgtggaggctttagtcccttggatacttgggaggctgtggaagaacagaaacgagctggtgcttaaagggagggaatttggaaccaatgaggtattagtaaggacacaagaagatgcagatgagtggattagaaggaaagaggctcagaatgtaaggaaagcaccaaccacaacaccgtcgggacagacgagaaacatgggaagctccaccacaatcttgggttaagtgcaactttgatggggcatggccaacagaaggattaaaatgtggcttagggtgggtgcttcgcgatcatacagggaaggtgttatggttaggtgcaagagctgtggtaaaagtaagaagcgtgctggaagtagaagtggaggctcttagatgggctgtgctgtcattatcccgattcaattataggaagatcatttttgaggtggattctcagcaacttgtgtctttggttacatgaaagttatgcttgtcaagtctcaatccaattatccaagacataaagtatctacttagcaagtttgaggattttatgcttgtgcatacaagccgagaaggaaatggagtggcagatagaatagctaaggaatctctttcttttgagaattatgatctaaagttgtattctattgtaccaatttgggttaaaagctctgttgagctagactacgc

SEQ ID NO: 418 - DNA, 2022 bp, Artificial Sequence
  Synthetic Construct
aaacaagttgtaatgagttgctggcctctcttgggattgttcatcaaagtagctgtccctacacaccacaacagaatggtgttgtggagagaaagcacagacacatccttgagatggcaagggcacttaagtttcagagtggtgtacctaccaggttttggggagactgtgtcaagactgttgtatacctgatcaatagactccctactccaatcttacaaggcaaatgtccatatgaactactctatcagaaacatgccaagcttgatcacttgagagtgtttgggtgtcttgcttttgcagcaacactgcccaaaggtgacaaacttgcacctagagccaagcgaaccatcttcattggttattctgagactcaaaagggttacaggttgtatgacttggataataaggtgatcatagtgagcagggatgtagttttcagagagtttcagttccctttcaaagagtccatctcccatgaacctgatatgttcactcgagcaggttcacttagctctgaagatacagctttgcagctagtgtataatgatatttttccttccagctttcatactgatgatgatgatactccagttcttattcctgacattgtagaggccaatgaggatatcactttggggactcattctacccaaaatcatatcacttcagctgatgctgcaccttcaggccacctgcatgctcctgcagagtcagttgagtcagctgagcctgacctagcaaatgctgaatttgagcaccatactgctgtagctgatccctctctagttccagcaaacctgcacactagacctaaacgcaatgcaggtcctcccatctggctcaaggactttgtgacactgaacaaaggctctagggatgttccataccctatagccaactatgtttcctatgatcacttgcctgttcactatcaagcttatttgagtgctttctccacttatactgaacctaaatccttcaaagaagcagctcaagatgagaaatggatggaggccatgtcccttgagatacaggctcttgaggataataacacctgggagattgtccctttaccccctggtaaacagcctatagggtccaaatgggtgtacaaaattaaatacaaagctaatggtgaagttgacaggtttaaggcaaggctagtggccaagggatacactcagcaagaaggccttgactaccatgaaactttttctccagtggccaaaatggtcactgtaaaagctgtcatatctgttgctgcttccaagggctggttccttttccagatggatgtcaacaatgcttttctacaaggtgacctcatggaagaagtttatatgtctctgcctcagggttttcacagccaaggggagaccaaagtgtgcaggctgttgaatccctctatggtttaaagcaagcatcaaggcagtggaacatcaagcttaccactgtccttatgcaggctggttttatgcaaagtgcttatgatcactccttgtttaccaaaagagaggggactgaccttgtcataatcctgatttatgtggatgatctgttaataacaggcagcagcaatgttttgatttcagaagcaaaggcaaccctgcatcagcatttcaagatgaaagatttgggagaactaaaatacttcttaggcattgaggtgctgagatcagaaaagggaatcctactgaaccagaggaagtatgcactggaactgatatcaggtgttggtctgggaggctgcagaccagtgtcaaccccaatggaacagaaccaaaggctgactactgtagaatatgacaagcacttaggaaagactgatgatgcagagttagaggatgtgggttcctatcagagactggtgggaaagcttctctacttgacaatcacaaggccagatatcagctttgcagtgcaggtgctgagtcaattcatgcagcaacccaaacagtcacacctggaagcagcattgagggttgtgaagtacataaaaggttctccaggtgttaggaa

SEQ ID NO: 419 - DNA, 115 bp, Artificial Sequence
  Synthetic Construct
ggatcatcaacaagtttgtacaaaaaagcaggctctttaaagtatttttacaacaattaccaacaacaacaaacaacaaacaacattacaattactatttacaattacaaaaaaa

SEQ ID NO: 420 - protein, 1465 aa, Artificial Sequence
  Synthetic Construct
MDKKYSIGLDIGTNSVGWAVITDEYKVPSKKFKVLGNTDRHSIKKNLIGALLFDSGETAEATRLKRTARRRYTRRKNRICYLQEIFSNEMAKVDDSFFHRLEESFLVEEDKKHERHPIFGNIVDEVAYHEKYPTIYHLRKKLVDSTDKADLRLIYLALAHMIKFRGHFLIEGDLNPDNSDVDKLFIQLVQTYNQLFEENPINASGVDAKAILSARLSKSRRLENLIAQLPGEKKNGLFGNLIALSLGLTPNFKSNFDLAEDAKLQLSKDTYDDDLDNLLAQIGDQYADLFLAAKNLSDAILLSDILRVNTEITKAPLSASMIKRYDEHHQDLTLLKALVRQQLPEKYKEIFFDQSKNGYAGYIDGGASQEEFYKFIKPILEKMDGTEELLVKLNREDLLRKQRTFDNGSIPHQIHLGELHAILRRQEDFYPFLKDNREKIEKILTFRIPYYVGPLARGNSRFAWMTRKSEETITPWNFEEVVDKGASAQSFIERMTNFDKNLPNEKVLPKHSLLYEYFTVYNELTKVKYVTEGMRKPAFLSGEQKKAIVDLLFKTNRKVTVKQLKEDYFKKIECFDSVEISGVEDRFNASLGTYHDLLKIIKDKDFLDNEENEDILEDIVLTLTLFEDREMIEERLKTYAHLFDDKVMKQLKRRRYTGWGRLSRKLINGIRDKQSGKTILDFLKSDGFANRNFMQLIHDDSLTFKEDIQKAQVSGQGDSLHEHIANLAGSPAIKKGILQTVKVVDELVKVMGRHKPENIVIEMARENQTTQKGQKNSRERMKRIEEGIKELGSQILKEHPVENTQLQNEKLYLYYLQNGRDMYVDQELDINRLSDYDVDHIVPQSFLKDDSIDNKVLTRSDKNRGKSDNVPSEEVVKKMKNYWRQLLNAKLITQRKFDNLTKAERGGLSELDKAGFIKRQLVETRQITKHVAQILDSRMNTKYDENDKLIREVKVITLKSKLVSDFRKDFQFYKVREINNYHHAHDAYLNAVVGTALIKKYPKLESEFVYGDYKVYDVRKMIAKSEQEIGKATAKYFFYSNIMNFFKTEITLANGEIRKRPLIETNGETGEIVWDKGRDFATVRKVLSMPQVNIVKKTEVQTGGFSKESILPKRNSDKLIARKKDWDPKKYGGFDSPTVAYSVLVVAKVEKGKSKKLKSVKELLGITIMERSSFEKNPIDFLEAKGYKEVKKDLIIKLPKYSLFELENGRKRMLASAGELQKGNELALPSKYVNFLYLASHYEKLKGSPEDNEQKQLFVEQHKHYLDEIIEQISEFSKRVILADANLDKVLSAYNKHRDKPIREQAENIIHLFTLTNLGAPAAFKYFDTTIDRKRYTSTKEVLDATLIHQSITGLYETRIDLSQLGGDYPYDVPDYAAAAAEFKREEQARKAKVNNEKKTEIVKPESCSNEGDVKDLKRKDSEDGNEGEEEEASSKPKKPKVALSHLQDIDDTEADQEEEPGGAP

SEQ ID NO: 421 - protein, 1367 aa, Artificial Sequence
  Synthetic Construct
MDKKYSIGLDIGTNSVGWAVITDEYKVPSKKFKVLGNTDRHSIKKNLIGALLFDSGETAEATRLKRTARRRYTRRKNRICYLQEIFSNEMAKVDDSFFHRLEESFLVEEDKKHERHPIFGNIVDEVAYHEKYPTIYHLRKKLVDSTDKADLRLIYLALAHMIKFRGHFLIEGDLNPDNSDVDKLFIQLVQTYNQLFEENPINASGVDAKAILSARLSKSRRLENLIAQLPGEKKNGLFGNLIALSLGLTPNFKSNFDLAEDAKLQLSKDTYDDDLDNLLAQIGDQYADLFLAAKNLSDAILLSDILRVNTEITKAPLSASMIKRYDEHHQDLTLLKALVRQQLPEKYKEIFFDQSKNGYAGYIDGGASQEEFYKFIKPILEKMDGTEELLVKLNREDLLRKQRTFDNGSIPHQIHLGELHAILRRQEDFYPFLKDNREKIEKILTFRIPYYVGPLARGNSRFAWMTRKSEETITPWNFEEVVDKGASAQSFIERMTNFDKNLPNEKVLPKHSLLYEYFTVYNELTKVKYVTEGMRKPAFLSGEQKKAIVDLLFKTNRKVTVKQLKEDYFKKIECFDSVEISGVEDRFNASLGTYHDLLKIIKDKDFLDNEENEDILEDIVLTLTLFEDREMIEERLKTYAHLFDDKVMKQLKRRRYTGWGRLSRKLINGIRDKQSGKTILDFLKSDGFANRNFMQLIHDDSLTFKEDIQKAQVSGQGDSLHEHIANLAGSPAIKKGILQTVKVVDELVKVMGRHKPENIVIEMARENQTTQKGQKNSRERMKRIEEGIKELGSQILKEHPVENTQLQNEKLYLYYLQNGRDMYVDQELDINRLSDYDVDHIVPQSFLKDDSIDNKVLTRSDKNRGKSDNVPSEEVVKKMKNYWRQLLNAKLITQRKFDNLTKAERGGLSELDKAGFIKRQLVETRQITKHVAQILDSRMNTKYDENDKLIREVKVITLKSKLVSDFRKDFQFYKVREINNYHHAHDAYLNAVVGTALIKKYPKLESEFVYGDYKVYDVRKMIAKSEQEIGKATAKYFFYSNIMNFFKTEITLANGEIRKRPLIETNGETGEIVWDKGRDFATVRKVLSMPQVNIVKKTEVQTGGFSKESILPKRNSDKLIARKKDWDPKKYGGFDSPTVAYSVLVVAKVEKGKSKKLKSVKELLGITIMERSSFEKNPIDFLEAKGYKEVKKDLIIKLPKYSLFELENGRKRMLASAGELQKGNELALPSKYVNFLYLASHYEKLKGSPEDNEQKQLFVEQHKHYLDEIIEQISEFSKRVILADANLDKVLSAYNKHRDKPIREQAENIIHLFTLTNLGAPAAFKYFDTTIDRKRYTSTKEVLDATLIHQSITGLYETRIDLSQLGG

SEQ ID NO: 422 - protein, 9 aa, Artificial Sequence
  Synthetic Construct
DYPYDVPDY

SEQ ID NO: 423 - protein, 89 aa, Artificial Sequence
  Synthetic Construct
AAAAAEFKREEQARKAKVNNEKKTEIVKPESCSNEGDVKDLKRKDSEDGNEGEEEEASSKPKKPKVALSHLQDIDDTEADQEEEPGGAP

SEQ ID NO: 424 - protein, 616 aa, Artificial Sequence
  Synthetic Construct
MASNFTQFVLVDNGGTGDVTVAPSNFANGVAEWISSNSRSQAYKVTCSVRQSSAQKRKYTIKVEVPKVATQTVGGVELPVAAWRSYLNMELTIPIFATNSDCELIVKAMQGLLKDGNPIPSAIAANSGIYSAGGGGSGGGGSGGGGSGPKKKRKVADYKDDDDKDYKDDDDKGAPSYQTSLYKKAEGPSRPEGDITMYPTGQQISFQTTPLNVQDPTRMMNLDQSSPVARNETQNGGGIAHAEFAMFNSKRLESDLEAMGNKIKQHEDNLKFLKSQKNKMDEAIVDLQVHMSKLNSSPTPRSENSDNSLQGEDINAQILRHENSAAGVLSLVETLHGAQASQLMLTKGVVGVVAKLGKVNDENLSQILSNYLGTRSMLAVVCRNYESVTALEAYDNHGNIDINAGLHCLGSSIGREIGDSFDAICLENLRPYVGQHIADDLQRRLDLLKPKLPNGECPPGFLGFAVNMIQIDPAYLLCVTSYGYGLRETLFYNLFSRLQVYKTRADMISALPCISDGAVSLDGGIIRKTGIFNLGNRDEVNVRFAKPTASRTMDNYSEAEKKMKELKWKKEKTLEDIKREQVLREHAVFNFGKKKEEFVRCLAQSSCTNQPMNTPR

SEQ ID NO: 425 - protein, 132 aa, Artificial Sequence
  Synthetic Construct
MASNFTQFVLVDNGGTGDVTVAPSNFANGVAEWISSNSRSQAYKVTCSVRQSSAQKRKYTIKVEVPKVATQTVGGVELPVAAWRSYLNMELTIPIFATNSDCELIVKAMQGLLKDGNPIPSAIAANSGIYSA

SEQ ID NO: 426 - protein, 15 aa, Artificial Sequence
  Synthetic Construct
GGGGSGGGGSGGGGS

SEQ ID NO: 427 - protein, 9 aa, Artificial Sequence
  Synthetic Construct
GPKKKRKVA

SEQ ID NO: 428 - protein, 17 aa, Artificial Sequence
  Synthetic Construct
DYKDDDDKDYKDDDDKG

SEQ ID NO: 429 - protein, 443 aa, Artificial Sequence
  Synthetic Construct
APSYQTSLYKKAEGPSRPEGDITMYPTGQQISFQTTPLNVQDPTRMMNLDQSSPVARNETQNGGGIAHAEFAMFNSKRLESDLEAMGNKIKQHEDNLKFLKSQKNKMDEAIVDLQVHMSKLNSSPTPRSENSDNSLQGEDINAQILRHENSAAGVLSLVETLHGAQASQLMLTKGVVGVVAKLGKVNDENLSQILSNYLGTRSMLAVVCRNYESVTALEAYDNHGNIDINAGLHCLGSSIGREIGDSFDAICLENLRPYVGQHIADDLQRRLDLLKPKLPNGECPPGFLGFAVNMIQIDPAYLLCVTSYGYGLRETLFYNLFSRLQVYKTRADMISALPCISDGAVSLDGGIIRKTGIFNLGNRDEVNVRFAKPTASRTMDNYSEAEKKMKELKWKKEKTLEDIKREQVLREHAVFNFGKKKEEFVRCLAQSSCTNQPMNTPR

SEQ ID NO: 430 - DNA, 15906 bp, Artificial Sequence
  Synthetic Construct
  misc_feature 15804, 15805, 15806, 15807, 15808, 15809, 15810, 15811, 15812,15813, 15814, 15815, 15816, 15817, 15818, 15819, 15820,15821, 15822, 15823: n = A,T,C or G
atgcatatgagtctagctcaacagagcttttaacccaaattggtacaatagaatacaactttagatcataattctcaaaagaaagagattccttagctattctatctgccactccatttccttctcggcttgtatgcacaagcataaaatcctcaaacttgctaagtagatactttatgtcttggataattggattgagacttgacaagcataactttcatgtaaccaaagacacaagttgctgagaatccacctcaaaaatgatcttcctataattgaatcgggataatgacagcacagcccatctaagagcctccacttctacttccagcacgcttcttacttttaccacagctcttgcacctaaccataacaccttccctgtatgatcgcgaagcacccaccctaagccacattttaatccttctgttggccatgccccatcaaagttgcacttaacccaagattgtggtggagcttcccatgtttctcgtctgtcccgacggtgttgtggttggtgctttccttacattctgagcctctttccttctaatccactcatctgcatcttcttgtgtccttactaatacctcattggttccaaattccctccctttaagcaccagctcgtttctgttcttccacagcctcccaagtatccaagggactaaagcctccacattcttcagatcaggatattcttgtttaagatgttgaactctatggaggtttgtatgaactgatgatctaggaccggataagttcccttcttcatagcgaacttattcaaagaatgttttgtgtatcattcttgttacattgttattaatgaaaaaatattattggtcattggactgaacacgagtgttaaatatggaccaggccccaaataagatccattgatatatgaattaaataacaagaataaatcgagtcaccaaaccacttgccttttttaacgagacttgttcaccaacttgatacaaaagtcattatcctatgcaaatcaataatcatacaaaaatatccaataacactaaaaaattaaaagaaatggataatttcacaatatgttatacgataaagaagttacttttccaagaaattcactgattttataagcccacttgcattagataaatggcaaaaaaaaacaaaaaggaaaagaaataaagcacgaagaattctagaaaatacgaaatacgcttcaatgcagtgggacccacggttcaattattgccaattttcagctccaccgtatatttaaaaaataaaacgataatgctaaaaaaatataaatcgtaacgatcgttaaatctcaacggctggatcttatgacgaccgttagaaattgtggttgtcgacgagtcagtaataaacggcgtcaaagtggttgcagccggcacacacgagtcgtgtttatcaactcaaagcacaaatacttttcctcaacctaaaaataaggcaattagccaaaaacaactttgcgtgtaaacaacgctcaatacacgtgtcattttattattagctattgcttcaccgccttagctttctcgtgacctagtcgtcctcgtcttttcttcttcttcttctataaaacaatacccaaagagctcttcttcttcacaattcagatttcaatttctcaaaatcttaaaaactttctctcaattctctctaccgtgatcaaggtaaatttctgtgttccttattctctcaaaatcttcgattttgttttcgttcgatcccaatttcgtatatgttctttggtttagattctgttaatcttagatcgaagacgattttctgggtttgatcgttagatatcatcttaattctcgattagggtttcatagatatcatccgatttgttcaaataatttgagttttgtcgaataattactcttcgatttgtgatttctatctagatctggtgttagtttctagtttgtgcgatcgaatttgtcgattaatctgagtttttctgattaacagggatcatcaacaagtttgtacaaaaaagcaggctctttaaagtatttttacaacaattaccaacaacaacaaacaacaaacaacattacaattactatttacaattacaaaaaaagttaacatggacaagaagtacagcatcggcctggccatcggcaccaactctgtgggctgggccgtgatcaccgacgagtacaaggtgcccagcaagaaattcaaggtgctgggcaacaccgaccggcacagcatcaagaagaacctgatcggcgccctgctgttcgacagcggagaaacagccgaggccacccggctgaagagaaccgccagaagaagatacaccagacggaagaaccggatctgctatctgcaagagatcttcagcaacgagatggccaaggtggacgacagcttcttccacagactggaagagtccttcctggtggaagaggataagaagcacgagcggcaccccatcttcggcaacatcgtggacgaggtggcctaccacgagaagtaccccaccatctaccacctgagaaagaaactggtggacagcaccgacaaggccgacctgcggctgatctatctggccctggcccacatgatcaagttccggggccacttcctgatcgagggcgacctgaaccccgacaacagcgacgtggacaagctgttcatccagctggtgcagacctacaaccagctgttcgaggaaaaccccatcaacgccagcggcgtggacgccaaggccatcctgtctgccagactgagcaagagcagacggctggaaaatctgatcgcccagctgcccggcgagaagaagaatggcctgttcggcaacctgattgccctgagcctgggcctgacccccaacttcaagagcaacttcgacctggccgaggatgccaaactgcagctgagcaaggacacctacgacgacgacctggacaacctgctggcccagatcggcgaccagtacgccgacctgtttctggccgccaagaacctgtccgacgccatcctgctgagcgacatcctgagagtgaacaccgagatcaccaaggcccccctgagcgcctctatgatcaagagatacgacgagcaccaccaggacctgaccctgctgaaagctctcgtgcggcagcagctgcctgagaagtacaaagagattttcttcgaccagagcaagaacggctacgccggctacatcgatggcggagccagccaggaagagttctacaagttcatcaagcccatcctggaaaagatggacggcaccgaggaactgctcgtgaagctgaacagagaggacctgctgcggaagcagcggaccttcgacaacggcagcatcccccaccagatccacctgggagagctgcacgccattctgcggcggcaggaagatttttacccattcctgaaggacaaccgggaaaagatcgagaagatcctgaccttccgcatcccctactacgtgggccctctggccaggggaaacagcagattcgcctggatgaccagaaagagcgaggaaaccatcaccccctggaacttcgaggaagtggtggacaagggcgccagcgcccagagcttcatcgagcggatgaccaacttcgataagaacctgcccaacgagaaggtgctgcccaagcacagcctgctgtacgagtacttcaccgtgtacaacgagctgaccaaagtgaaatacgtgaccgagggaatgagaaagcccgccttcctgagcggcgagcagaaaaaagccatcgtggacctgctgttcaagaccaaccggaaagtgaccgtgaagcagctgaaagaggactacttcaagaaaatcgagtgcttcgactccgtggaaatctccggcgtggaagatcggttcaacgcctccctgggcacataccacgatctgctgaaaattatcaaggacaaggacttcctggacaatgaggaaaacgaggacattctggaagatatcgtgctgaccctgacactgtttgaggacagagagatgatcgaggaacggctgaaaacctatgcccacctgttcgacgacaaagtgatgaagcagctgaagcggcggagatacaccggctggggcaggctgagccggaagctgatcaacggcatccgggacaagcagtccggcaagacaatcctggatttcctgaagtccgacggcttcgccaacagaaacttcatgcagctgatccacgacgacagcctgacctttaaagaggacatccagaaagcccaggtgtccggccagggcgatagcctgcacgagcacattgccaatctggccggcagccccgccattaagaagggcatcctgcagacagtgaaggtggtggacgagctcgtgaaagtgatgggccggcacaagcccgagaacatcgtgatcgaaatggccagagagaaccagaccacccagaagggacagaagaacagccgcgagagaatgaagcggatcgaagagggcatcaaagagctgggcagccagatcctgaaagaacaccccgtggaaaacacccagctgcagaacgagaagctgtacctgtactacctgcagaatgggcgggatatgtacgtggaccaggaactggacatcaaccggctgtccgactacgatgtggacgctatcgtgcctcagagctttctgaaggacgactccatcgataacaaagtgctgactcggagcgacaagaaccggggcaagagcgacaacgtgccctccgaagaggtcgtgaagaagatgaagaactactggcgccagctgctgaatgccaagctgattacccagaggaagttcgacaatctgaccaaggccgagagaggcggcctgagcgaactggataaggccggcttcatcaagagacagctggtggaaacccggcagatcacaaagcacgtggcacagatcctggactcccggatgaacactaagtacgacgagaacgacaaactgatccgggaagtgaaagtgatcaccctgaagtccaagctggtgtccgatttccggaaggatttccagttttacaaagtgcgcgagatcaacaactaccaccacgcccacgacgcctacctgaacgccgtcgtgggaaccgccctgatcaaaaagtaccctaagctggaaagcgagttcgtgtacggcgactacaaggtgtacgacgtgcggaagatgatcgccaagagcgagcaggaaatcggcaaggctaccgccaagtacttcttctacagcaacatcatgaactttttcaagaccgagattaccctggccaacggcgagatccggaagcggcctctgatcgagacaaacggcgaaacaggcgagatcgtgtgggataagggccgggactttgccaccgtgcggaaagtgctgtctatgccccaagtgaatatcgtgaaaaagaccgaggtgcagacaggcggcttcagcaaagagtctatcctgcccaagaggaacagcgacaagctgatcgccagaaagaaggactgggaccctaagaagtacggcggcttcgacagccccaccgtggcctattctgtgctggtggtggccaaagtggaaaagggcaagtccaagaaactgaagagtgtgaaagagctgctggggatcaccatcatggaaagaagcagcttcgagaagaatcccatcgactttctggaagccaagggctacaaagaagtgaaaaaggacctgatcatcaagctgcctaagtactccctgttcgagctggaaaacggccggaagagaatgctggcctctgccggcgaactgcagaagggaaacgaactggccctgccctccaaatatgtgaacttcctgtacctggccagccactatgagaagctgaagggctcccccgaggataatgagcagaaacagctgtttgtggaacagcacaaacactacctggacgagatcatcgagcagatcagcgagttctccaagagagtgatcctggccgacgctaatctggacaaggtgctgagcgcctacaacaagcacagagacaagcctatcagagagcaggccgagaatatcatccacctgtttaccctgaccaatctgggagcccctgccgccttcaagtactttgacaccaccatcgaccggaagaggtacaccagcaccaaagaggtgctggacgccaccctgatccaccagagcatcaccggcctgtacgagacacggatcgacctgtctcagctgggaggcgacgcctatccctatgacgtgcccgattatgccagcctgggcagcggctcccccaagaaaaaacgcaaggtggaagatcctaagaaaaagcggaaagtggacggcattggtagtgggagcaacggcagcagcggatccaacggtccgactgacgccgcggaagaagaacttttgagcaagaattatcatcttgagaacgaagtggctcgtcttaagaaaggttctggcagtggagaagaactgctttcaaagaattaccacctggaaaatgaggtagctagactgaaaaaggggagcggaagtggggaggagttgctgagcaaaaattatcatttggagaacgaagtagcacgactaaagaaagggtccggatcgggtgaggagttactctcgaaaaattatcatctcgaaaacgaagtggctcggctaaaaaagggcagtggttctggagaagagctattatctaaaaactaccacctcgaaaatgaggtggcacgcttaaaaaagggaagtggcagtggtgaagagctactatccaagaattatcatcttgagaacgaggtagcgcgtttgaagaagggttccggctcaggagaggaactgctctcgaagaactatcatcttgaaaatgaggtcgctcgattaaaaaagggatcgggcagtggtgaggaactactttcaaagaattaccacctcgaaaacgaagtagctcgattaaagaaaggttcagggtcgggtgaagaattactgagtaaaaattatcatctggaaaatgaggtagcgagactaaaaaaggggagtggttctggcgaggaattgctatcgaaaaattatcatcttgagaacgaagttgctaggctcaaaaagggctcaggctcaggctaacccgggggcgcgccatgataactagagtcctgctttaatgagatatgcgagacgcctatgatcgcatgatatttgctttcaattctgttgtgcacgttgtaaaaaacctgagcatgtgtagctcagatccttaccgccggtttcggttcattctaatgaatatatcacccgttactatcgtatttttatgaataatattctccgttcaatttactgattgtaccctactacttatatgtacaatattaaaatgaaaacaatatattgtgctgaataggtttatagcgacatctatgatagagcgccacaataacaaacaattgcgttttattattacaaatccaattttaaaaaaagcggcagaaccggtcaaacctaaaagactgattacataaatcttattcaaatttcaaaagtgccccaggggctagtatctacgacacaccgagcggcgaactaataacgttcactgaagggaactccggttccccgccggcgcgcatgggtgagattccttgaagttgagtattggccgtccgctctaccgaaagttacgggcaccattcaacccggtccagcacggcggccgggtaaccgacttgctgccccgagaattatgcagcatttttttggtgtatgtgggccccaaatgaagtgcaggtcaaaccttgacagtgacgacaaatcgttgggcgggtccagggcgaattttgcgacaacatgtcgaggctcagcaggaccggcatgcaagctagcttactagtgatattctatagtgtcacctaaatctgcggccgcttcctaacacctggagaaccttttatgtacttcacaaccctcaatgctgcttccaggtgtgactgtttgggttgctgcatgaattgactcagcacctgcactgcaaagctgatatctggccttgtgattgtcaagtagagaagctttcccaccagtctctgataggatcccacatcctctaactctgcatcatcagtctttcctaagtgcttgtcatattctacagtagtcagcctttggttctgttccattggggttgacactggtctgcagcctcccagaccaacacctgatatcagttccagtgcatacttcctctggttcagtaggattcccttttctgatctcagcacctcaatgcctaagaagtattttagttctcccaaatctttcatcttgaaatgctgatgcagggttgcctttgcttctgaaatcaaaacattgctgctgcctgttattaacagatcatccacataaatcaggattatgacaaggtcagtcccctctcttttggtaaacaaggagtgatcataagcactttgcataaaaccagcctgcataaggacagtggtaagcttgatgttccactgccttgatgcttgctttaaaccatagagggattcaacagcctgcacactttggtctccccttggctgtgaaaaccctgaggcagagacatataaacttcttccatgaggtcaccttgtagaaaagcattgttgacatccatctggaaaaggaaccagcccttggaagcagcaacagatatgacagcttttacagtgaccattttggccactggagaaaaagtttcatggtagtcaaggccttcttgctgagtgtatcccttggccactagccttgccttaaacctgtcaacttcaccattagctttgtatttaattttgtacacccatttggaccctataggctgtttaccagggggtaaagggacaatctcccaggtgttattatcctcaagagcctgtatctcaagggacatggcctccatccatttctcatcttgagctgcttctttgaaggatttaggttcagtataagtggagaaagcactcaaataagcttgatagtgaacaggcaagtgatcataggaaacatagttggctatagggtatggaacatccctagagcctttgttcagtgtcacaaagtccttgagccagatgggaggacctgcattgcgtttaggtctagtgtgcaggtttgctggaactagagagggatcagctacagcagtatggtgctcaaattcagcatttgctaggtcaggctcagctgactcaactgactctgcaggagcatgcaggtggcctgaaggtgcagcatcagctgaagtgatatgattttgggtagaatgagtccccaaagtgatatcctcattggcctctacaatgtcaggaataagaactggagtatcatcatcatcagtatgaaagctggaaggaaaaatatcattatacactagctgcaaagctgtatcttcagagctaagtgaacctgctcgagtgaacatatcaggttcatgggagatggactctttgaaagggaactgaaactctctgaaaactacatccctgctcactatgatcaccttattatccaagtcatacaacctgtaacccttttgagtctcagaataaccaatgaagatggttcgcttggctctaggtgcaagtttgtcacctttgggcagtgttgctgcaaaagcaagacacccaaacactctcaagtgatcaagcttggcatgtttctgatagagtagttcatatggacatttgccttgtaagattggagtagggagtctattgatcaggtatacaacagtcttgacacagtctccccaaaacctggtaggtacaccactctgaaacttaagtgcccttgccatctcaaggatgtgtctgtgctttctctccacaacaccattctgttgtggtgtgtagggacagctactttgatgaacaatcccaagagaggccagcaactcattacaacttgtttcctaggatgcatatgagtctagctcaacagagcttttaacccaaattggtacaatagaatacaactttagatcataattctcaaaagaaagagattccttagctattctatctgccactccatttccttctcggcttgtatgcacaagcataaaatcctcaaacttgctaagtagatactttatgtcttggataattggattgagacttgacaagcataactttcatgtaaccaaagacacaagttgctgagaatccacctcaaaaatgatcttcctataattgaatcgggataatgacagcacagcccatctaagagcctccacttctacttccagcacgcttcttacttttaccacagctcttgcacctaaccataacaccttccctgtatgatcgcgaagcacccaccctaagccacattttaatccttctgttggccatgccccatcaaagttgcacttaacccaagattgtggtggagcttcccatgtttctcgtctgtcccgacggtgttgtggttggtgctttccttacattctgagcctctttccttctaatccactcatctgcatcttcttgtgtccttactaatacctcattggttccaaattccctccctttaagcaccagctcgtttctgttcttccacagcctcccaagtatccaagggactaaagcctccacattcttcagatcaggatattcttgtttaagatgttgaactctatggaggtttgtatgaactgatgatctaggaccggataagttcccttcttcatagcgaacttattcaaagaatgttttgtgtatcattcttgttacattgttattaatgaaaaaatattattggtcattggactgaacacgagtgttaaatatggaccaggccccaaataagatccattgatatatgaattaaataacaagaataaatcgagtcaccaaaccacttgccttttttaacgagacttgttcaccaacttgatacaaaagtcattatcctatgcaaatcaataatcatacaaaaatatccaataacactaaaaaattaaaagaaatggataatttcacaatatgttatacgataaagaagttacttttccaagaaattcactgattttataagcccacttgcattagataaatggcaaaaaaaaacaaaaaggaaaagaaataaagcacgaagaattctagaaaatacgaaatacgcttcaatgcagtgggacccacggttcaattattgccaattttcagctccaccgtatatttaaaaaataaaacgataatgctaaaaaaatataaatcgtaacgatcgttaaatctcaacggctggatcttatgacgaccgttagaaattgtggttgtcgacgagtcagtaataaacggcgtcaaagtggttgcagccggcacacacgagtcgtgtttatcaactcaaagcacaaatacttttcctcaacctaaaaataaggcaattagccaaaaacaactttgcgtgtaaacaacgctcaatacacgtgtcattttattattagctattgcttcaccgccttagctttctcgtgacctagtcgtcctcgtcttttcttcttcttcttctataaaacaatacccaaagagctcttcttcttcacaattcagatttcaatttctcaaaatcttaaaaactttctctcaattctctctaccgtgatcaaggtaaatttctgtgttccttattctctcaaaatcttcgattttgttttcgttcgatcccaatttcgtatatgttctttggtttagattctgttaatcttagatcgaagacgattttctgggtttgatcgttagatatcatcttaattctcgattagggtttcatagatatcatccgatttgttcaaataatttgagttttgtcgaataattactcttcgatttgtgatttctatctagatctggtgttagtttctagtttgtgcgatcgaatttgtcgattaatctgagtttttctgattaacacctagggtttatgggccccgacatcgtgatgacccagagccccagcagcctgagcgccagcgtgggcgaccgcgtgaccatcacctgccgcagcagcaccggcgccgtgaccaccagcaactacgccagctgggtgcaggagaagcccggcaagctgttcaagggcctgatcggcggcaccaacaaccgcgcccccggcgtgcccagccgcttcagcggcagcctgatcggcgacaaggccaccctgaccatcagcagcctgcagcccgaggacttcgccacctacttctgcgccctgtggtacagcaaccactgggtgttcggccagggcaccaaggtggagctgaagcgcggcggcggcggcagcggcggcggcggcagcggcggcggcggcagcagcggcggcggcagcgaggtgaagctgctggagagcggcggcggcctggtgcagcccggcggcagcctgaagctgagctgcgccgtgagcggcttcagcctgaccgactacggcgtgaactgggtgcgccaggcccccggccgcggcctggagtggatcggcgtgatctggggcgacggcatcaccgactacaacagcgccctgaaggaccgcttcatcatcagcaaggacaacggcaagaacaccgtgtacctgcagatgagcaaggtgcgcagcgacgacaccgccctgtactactgcgtgaccggcctgttcgactactggggccagggcaccctggtgaccgtgagcagctacccatacgatgttccagattacgctggtggaggcggaggttctgggggaggaggtagtggcggtggtggttcaggaggcggcggaagcttggatccaggtggaggtggaagcggtagcaaaggagaagaacttttcactggagttgtcccaattcttgttgaattagatggtgatgttaatgggcacaaattttctgtccgtggagagggtgaaggtgatgctacaaacggaaaactcacccttaaatttatttgcactactggaaaactacctgttccgtggccaacacttgtcactactctgacctatggtgttcaatgcttttcccgttatccggatcacatgaaacggcatgactttttcaagagtgccatgcccgaaggttatgtacaggaacgcactatatctttcaaagatgacgggacctacaagacgcgtgctgaagtcaagtttgaaggtgatacccttgttaatcgtatcgagttaaagggtattgattttaaagaagatggaaacattcttggacacaaactcgagtacaactttaactcacacaatgtatacatcacggcagacaaacaaaagaatggaatcaaagctaacttcaaaattcgccacaacgttgaagatggttccgttcaactagcagaccattatcaacaaaatactccaattggcgatggccctgtccttttaccagacaaccattacctgtcgacacaatctgtcctttcgaaagatcccaacgaaaagcgtgaccacatggtccttcttgagtttgtaactgctgctgggattacacatggcatggatgagctctacaaaggtggaggtcggaccggtcgtacgggcggtggcggagggatgtatccgactggtcaacagatttcgtttcagaccactccgttgaatgttcaagatccaacaaggatgatgaatttggatcaatcttcaccagttgcaagaaatgaaactcagaatggaggaggcattgctcacgctgagtttgctatgttcaattccaagaggcttgaatctgatcttgaagctatgggtaacaaaatcaaacagcatgaggataatctcaagtttctcaagtctcagaaaaacaaaatggatgaagctatcgtcgacttgcaagttcatatgagtaagcttaactcgtctcctactcctagaagtgaaaactctgataacagtcttcagggtgaagatatcaatgcacagatccttcgccacgaaaactcagctgctggagttttaagtctggttgagactcttcatggtgctcaagcttctcagttgatgttgacaaaaggtgttgttggtgttgtagcgaaacttgggaaggtcaatgatgaaaatctcagccagattttgtcgaattatttggggactcgctcaatgttggcagttgtatgcaggaattatgaaagtgttacggctttagaggcttatgataaccatggcaacattgatataaatgctggccttcattgccttggctcttcgattggaagagagattggagacagttttgatgccatctgccttgaaaacctgaggccgtatgttggtcagcacatagctgatgatctgcaaagaaggcttgatcttctgaaaccaaaattacctaatggtgagtgtcctcccgggtttctcggatttgcagtgaatatgatacagatcgatccagcttacttgctctgtgtcacatcatatggatatggtcttcgtgagaccttgttctacaatctattctctcgccttcaagtttacaaaacaagggccgatatgattagtgccctcccatgcataagtgatggtgcggtatctttggatggaggaatcatcaggaaaacggggatcttcaatcttggaaaccgtgatgaggtgaacgtgagatttgcaaagccaactgcttctcgcacgatggacaactatagtgaggcggagaagaaaatgaaagagctgaaatggaaaaaggagaaaacgctggaggacattaagcgggagcaagtgctccgtgagcatgccgtcttcaactttggcaagaagaaagaagaatttgttcgatgcttggctcagagttcatgcactaatcagccaatgaacacacccagacgtacgggaggaggatctcggaccgaagagtacaagcttatcctgaacggtaaaaccctgaaaggtgaaaccaccaccgaagctgttgacgctgctaccgcggaaaaagttttcaaacagtacgctaacgacaacggtgttgacggtgaatggacctacgacgacgctaccaaaaccttcacggtaaccgaaggtggtggtagcggtggtggtactagtccaaaaacaaggaggagaccgcgaagatcacaacggaaaaggccgcctacgccatggccgtaagtttgagctcgaatttccccgatcgttcaaacatttggcaataaagtttcttaagattgaatcctgttgccggtcttgcgatgattatcatataatttctgttgaattacgttaagcatgtaataattaacatgtaatgcatgacgttatttatgagatgggtttttatgattagagtcccgcaattatacatttaatacgcgatagaaaacaaaatatagcgcgcaaactaggataaattatcgcgcgcggtgtcatctatgttacgtttaagctttcgttgaacaacggaaactcgacttgccttccgcacaatacatcatttcttcttagctttttttcttcttcttcgttcatacagtttttttttgtttatcagcttacattttcttgaaccgtagctttcgttttcttctttttaactttccattcggagtttttgtatcttgtttcatagtttgtcccaggattagaatgattaggcatcgaaccttcaagaatttgattgaataaaacatcttcattcttaagatatgaagataatcttcaaaaggcccctgggaatctgaaagaagagaagcaggcccatttatatgggaaagaacaatagtatttcttatataggcccatttaagttgaaaacaatcttcaaaagtcccacatcgcttagataagaaaacgaagctgagtttatatacagctagagtcgaagtagtgattgnnnnnnnnnnnnnnnnnnnngttttagagctagaaatagcaagttaaaataaggctagtccgttatcaacttgaaaaagtggcaccgagtcggtgcttttttt

SEQ ID NO: 431 - DNA, 1994 bp, Artificial Sequence
  Synthetic Construct
atgcatatgagtctagctcaacagagcttttaacccaaattggtacaatagaatacaactttagatcataattctcaaaagaaagagattccttagctattctatctgccactccatttccttctcggcttgtatgcacaagcataaaatcctcaaacttgctaagtagatactttatgtcttggataattggattgagacttgacaagcataactttcatgtaaccaaagacacaagttgctgagaatccacctcaaaaatgatcttcctataattgaatcgggataatgacagcacagcccatctaagagcctccacttctacttccagcacgcttcttacttttaccacagctcttgcacctaaccataacaccttccctgtatgatcgcgaagcacccaccctaagccacattttaatccttctgttggccatgccccatcaaagttgcacttaacccaagattgtggtggagcttcccatgtttctcgtctgtcccgacggtgttgtggttggtgctttccttacattctgagcctctttccttctaatccactcatctgcatcttcttgtgtccttactaatacctcattggttccaaattccctccctttaagcaccagctcgtttctgttcttccacagcctcccaagtatccaagggactaaagcctccacattcttcagatcaggatattcttgtttaagatgttgaactctatggaggtttgtatgaactgatgatctaggaccggataagttcccttcttcatagcgaacttattcaaagaatgttttgtgtatcattcttgttacattgttattaatgaaaaaatattattggtcattggactgaacacgagtgttaaatatggaccaggccccaaataagatccattgatatatgaattaaataacaagaataaatcgagtcaccaaaccacttgccttttttaacgagacttgttcaccaacttgatacaaaagtcattatcctatgcaaatcaataatcatacaaaaatatccaataacactaaaaaattaaaagaaatggataatttcacaatatgttatacgataaagaagttacttttccaagaaattcactgattttataagcccacttgcattagataaatggcaaaaaaaaacaaaaaggaaaagaaataaagcacgaagaattctagaaaatacgaaatacgcttcaatgcagtgggacccacggttcaattattgccaattttcagctccaccgtatatttaaaaaataaaacgataatgctaaaaaaatataaatcgtaacgatcgttaaatctcaacggctggatcttatgacgaccgttagaaattgtggttgtcgacgagtcagtaataaacggcgtcaaagtggttgcagccggcacacacgagtcgtgtttatcaactcaaagcacaaatacttttcctcaacctaaaaataaggcaattagccaaaaacaactttgcgtgtaaacaacgctcaatacacgtgtcattttattattagctattgcttcaccgccttagctttctcgtgacctagtcgtcctcgtcttttcttcttcttcttctataaaacaatacccaaagagctcttcttcttcacaattcagatttcaatttctcaaaatcttaaaaactttctctcaattctctctaccgtgatcaaggtaaatttctgtgttccttattctctcaaaatcttcgattttgttttcgttcgatcccaatttcgtatatgttctttggtttagattctgttaatcttagatcgaagacgattttctgggtttgatcgttagatatcatcttaattctcgattagggtttcatagatatcatccgatttgttcaaataatttgagttttgtcgaataattactcttcgatttgtgatttctatctagatctggtgttagtttctagtttgtgcgatcgaatttgtcgattaatctgagtttttctgattaaca

SEQ ID NO: 432 - DNA, 115 bp, Artificial Sequence; identical to SEQ ID NO: 419
  Synthetic Construct

SEQ ID NO: 433 - DNA, 768 bp, Artificial Sequence
  Synthetic Construct
tagagtcctgctttaatgagatatgcgagacgcctatgatcgcatgatatttgctttcaattctgttgtgcacgttgtaaaaaacctgagcatgtgtagctcagatccttaccgccggtttcggttcattctaatgaatatatcacccgttactatcgtatttttatgaataatattctccgttcaatttactgattgtaccctactacttatatgtacaatattaaaatgaaaacaatatattgtgctgaataggtttatagcgacatctatgatagagcgccacaataacaaacaattgcgttttattattacaaatccaattttaaaaaaagcggcagaaccggtcaaacctaaaagactgattacataaatcttattcaaatttcaaaagtgccccaggggctagtatctacgacacaccgagcggcgaactaataacgttcactgaagggaactccggttccccgccggcgcgcatgggtgagattccttgaagttgagtattggccgtccgctctaccgaaagttacgggcaccattcaacccggtccagcacggcggccgggtaaccgacttgctgccccgagaattatgcagcatttttttggtgtatgtgggccccaaatgaagtgcaggtcaaaccttgacagtgacgacaaatcgttgggcgggtccagggcgaattttgcgacaacatgtcgaggctcagcaggaccggcatgcaagctagcttactagtgatattctatagtgtcacctaaatct

SEQ ID NO: 434 - DNA, 2018 bp, Artificial Sequence
  Synthetic Construct
ttcctaacacctggagaaccttttatgtacttcacaaccctcaatgctgcttccaggtgtgactgtttgggttgctgcatgaattgactcagcacctgcactgcaaagctgatatctggccttgtgattgtcaagtagagaagctttcccaccagtctctgataggatcccacatcctctaactctgcatcatcagtctttcctaagtgcttgtcatattctacagtagtcagcctttggttctgttccattggggttgacactggtctgcagcctcccagaccaacacctgatatcagttccagtgcatacttcctctggttcagtaggattcccttttctgatctcagcacctcaatgcctaagaagtattttagttctcccaaatctttcatcttgaaatgctgatgcagggttgcctttgcttctgaaatcaaaacattgctgctgcctgttattaacagatcatccacataaatcaggattatgacaaggtcagtcccctctcttttggtaaacaaggagtgatcataagcactttgcataaaaccagcctgcataaggacagtggtaagcttgatgttccactgccttgatgcttgctttaaaccatagagggattcaacagcctgcacactttggtctccccttggctgtgaaaaccctgaggcagagacatataaacttcttccatgaggtcaccttgtagaaaagcattgttgacatccatctggaaaaggaaccagcccttggaagcagcaacagatatgacagcttttacagtgaccattttggccactggagaaaaagtttcatggtagtcaaggccttcttgctgagtgtatcccttggccactagccttgccttaaacctgtcaacttcaccattagctttgtatttaattttgtacacccatttggaccctataggctgtttaccagggggtaaagggacaatctcccaggtgttattatcctcaagagcctgtatctcaagggacatggcctccatccatttctcatcttgagctgcttctttgaaggatttaggttcagtataagtggagaaagcactcaaataagcttgatagtgaacaggcaagtgatcataggaaacatagttggctatagggtatggaacatccctagagcctttgttcagtgtcacaaagtccttgagccagatgggaggacctgcattgcgtttaggtctagtgtgcaggtttgctggaactagagagggatcagctacagcagtatggtgctcaaattcagcatttgctaggtcaggctcagctgactcaactgactctgcaggagcatgcaggtggcctgaaggtgcagcatcagctgaagtgatatgattttgggtagaatgagtccccaaagtgatatcctcattggcctctacaatgtcaggaataagaactggagtatcatcatcatcagtatgaaagctggaaggaaaaatatcattatacactagctgcaaagctgtatcttcagagctaagtgaacctgctcgagtgaacatatcaggttcatgggagatggactctttgaaagggaactgaaactctctgaaaactacatccctgctcactatgatcaccttattatccaagtcatacaacctgtaacccttttgagtctcagaataaccaatgaagatggttcgcttggctctaggtgcaagtttgtcacctttgggcagtgttgctgcaaaagcaagacacccaaacactctcaagtgatcaagcttggcatgtttctgatagagtagttcatatggacatttgccttgtaagattggagtagggagtctattgatcaggtatacaacagtcttgacacagtctccccaaaacctggtaggtacaccactctgaaacttaagtgcccttgccatctcaaggatgtgtctgtgctttctctccacaacaccattctgttgtggtgtgtagggacagctactttgatgaacaatcccaagagaggccagcaactcattacaactt

SEQ ID NO: 435 - DNA, 263 bp, Artificial Sequence
  Synthetic Construct
gagctcgaatttccccgatcgttcaaacatttggcaataaagtttcttaagattgaatcctgttgccggtcttgcgatgattatcatataatttctgttgaattacgttaagcatgtaataattaacatgtaatgcatgacgttatttatgagatgggtttttatgattagagtcccgcaattatacatttaatacgcgatagaaaacaaaatatagcgcgcaaactaggataaattatcgcgcgcggtgtcatctatgttac

SEQ ID NO: 436 - DNA, 553 bp, Artificial Sequence
  Synthetic Construct
  misc_feature 451, 452, 453, 454, 455, 456, 457, 458, 459, 460, 461, 462,463, 464, 465, 466, 467, 468, 469, 470: n = A,T,C or G
aagctttcgttgaacaacggaaactcgacttgccttccgcacaatacatcatttcttcttagctttttttcttcttcttcgttcatacagtttttttttgtttatcagcttacattttcttgaaccgtagctttcgttttcttctttttaactttccattcggagtttttgtatcttgtttcatagtttgtcccaggattagaatgattaggcatcgaaccttcaagaatttgattgaataaaacatcttcattcttaagatatgaagataatcttcaaaaggcccctgggaatctgaaagaagagaagcaggcccatttatatgggaaagaacaatagtatttcttatataggcccatttaagttgaaaacaatcttcaaaagtcccacatcgcttagataagaaaacgaagctgagtttatatacagctagagtcgaagtagtgattgnnnnnnnnnnnnnnnnnnnngttttagagctagaaatagcaagttaaaataaggctagtccgttatcaacttgaaaaagtggcaccgagtcggtgcttttttt

SEQ ID NO: 437 - DNA, 19 bp, Artificial Sequence
  Synthetic Construct
  misc_feature 1, 2, 3, 4, 5, 6, 7, 8, 9, 10, 11, 12, 13, 14, 15, 16, 17,18, 19: n = A,T,C or G
nnnnnnnnnnnnnnnnnnn

SEQ ID NO: 438 - protein, 1692 aa, Artificial Sequence
  Synthetic Construct
MDKKYSIGLAIGTNSVGWAVITDEYKVPSKKFKVLGNTDRHSIKKNLIGALLFDSGETAEATRLKRTARRRYTRRKNRICYLQEIFSNEMAKVDDSFFHRLEESFLVEEDKKHERHPIFGNIVDEVAYHEKYPTIYHLRKKLVDSTDKADLRLIYLALAHMIKFRGHFLIEGDLNPDNSDVDKLFIQLVQTYNQLFEENPINASGVDAKAILSARLSKSRRLENLIAQLPGEKKNGLFGNLIALSLGLTPNFKSNFDLAEDAKLQLSKDTYDDDLDNLLAQIGDQYADLFLAAKNLSDAILLSDILRVNTEITKAPLSASMIKRYDEHHQDLTLLKALVRQQLPEKYKEIFFDQSKNGYAGYIDGGASQEEFYKFIKPILEKMDGTEELLVKLNREDLLRKQRTFDNGSIPHQIHLGELHAILRRQEDFYPFLKDNREKIEKILTFRIPYYVGPLARGNSRFAWMTRKSEETITPWNFEEVVDKGASAQSFIERMTNFDKNLPNEKVLPKHSLLYEYFTVYNELTKVKYVTEGMRKPAFLSGEQKKAIVDLLFKTNRKVTVKQLKEDYFKKIECFDSVEISGVEDRFNASLGTYHDLLKIIKDKDFLDNEENEDILEDIVLTLTLFEDREMIEERLKTYAHLFDDKVMKQLKRRRYTGWGRLSRKLINGIRDKQSGKTILDFLKSDGFANRNFMQLIHDDSLTFKEDIQKAQVSGQGDSLHEHIANLAGSPAIKKGILQTVKVVDELVKVMGRHKPENIVIEMARENQTTQKGQKNSRERMKRIEEGIKELGSQILKEHPVENTQLQNEKLYLYYLQNGRDMYVDQELDINRLSDYDVDAIVPQSFLKDDSIDNKVLTRSDKNRGKSDNVPSEEVVKKMKNYWRQLLNAKLITQRKFDNLTKAERGGLSELDKAGFIKRQLVETRQITKHVAQILDSRMNTKYDENDKLIREVKVITLKSKLVSDFRKDFQFYKVREINNYHHAHDAYLNAVVGTALIKKYPKLESEFVYGDYKVYDVRKMIAKSEQEIGKATAKYFFYSNIMNFFKTEITLANGEIRKRPLIETNGETGEIVWDKGRDFATVRKVLSMPQVNIVKKTEVQTGGFSKESILPKRNSDKLIARKKDWDPKKYGGFDSPTVAYSVLVVAKVEKGKSKKLKSVKELLGITIMERSSFEKNPIDFLEAKGYKEVKKDLIIKLPKYSLFELENGRKRMLASAGELQKGNELALPSKYVNFLYLASHYEKLKGSPEDNEQKQLFVEQHKHYLDEIIEQISEFSKRVILADANLDKVLSAYNKHRDKPIREQAENIIHLFTLTNLGAPAAFKYFDTTIDRKRYTSTKEVLDATLIHQSITGLYETRIDLSQLGGDAYPYDVPDYASLGSGSPKKKRKVEDPKKKRKVGACGGCATTGGTAGTGGGAGCAACGGCAGCAGCGGATCCCGGTCCGCCGCGEEELLSKNYHLENEVARLKKGSGSGEELLSKNYHLENEVARLKKGSGSGEELLSKNYHLENEVARLKKGSGSGEELLSKNYHLENEVARLKKGSGSGEELLSKNYHLENEVARLKKGSGSGEELLSKNYHLENEVARLKKGSGSGEELLSKNYHLENEVARLKKGSGSGEELLSKNYHLENEVARLKKGSGSGEELLSKNYHLENEVARLKKGSGSGEELLSKNYHLENEVARLKKGSGSG

SEQ ID NO: 439 - protein, 1369 aa, Artificial Sequence
  Synthetic Construct
MDKKYSIGLAIGTNSVGWAVITDEYKVPSKKFKVLGNTDRHSIKKNLIGALLFDSGETAEATRLKRTARRRYTRRKNRICYLQEIFSNEMAKVDDSFFHRLEESFLVEEDKKHERHPIFGNIVDEVAYHEKYPTIYHLRKKLVDSTDKADLRLIYLALAHMIKFRGHFLIEGDLNPDNSDVDKLFIQLVQTYNQLFEENPINASGVDAKAILSARLSKSRRLENLIAQLPGEKKNGLFGNLIALSLGLTPNFKSNFDLAEDAKLQLSKDTYDDDLDNLLAQIGDQYADLFLAAKNLSDAILLSDILRVNTEITKAPLSASMIKRYDEHHQDLTLLKALVRQQLPEKYKEIFFDQSKNGYAGYIDGGASQEEFYKFIKPILEKMDGTEELLVKLNREDLLRKQRTFDNGSIPHQIHLGELHAILRRQEDFYPFLKDNREKIEKILTFRIPYYVGPLARGNSRFAWMTRKSEETITPWNFEEVVDKGASAQSFIERMTNFDKNLPNEKVLPKHSLLYEYFTVYNELTKVKYVTEGMRKPAFLSGEQKKAIVDLLFKTNRKVTVKQLKEDYFKKIECFDSVEISGVEDRFNASLGTYHDLLKIIKDKDFLDNEENEDILEDIVLTLTLFEDREMIEERLKTYAHLFDDKVMKQLKRRRYTGWGRLSRKLINGIRDKQSGKTILDFLKSDGFANRNFMQLIHDDSLTFKEDIQKAQVSGQGDSLHEHIANLAGSPAIKKGILQTVKVVDELVKVMGRHKPENIVIEMARENQTTQKGQKNSRERMKRIEEGIKELGSQILKEHPVENTQLQNEKLYLYYLQNGRDMYVDQELDINRLSDYDVDAIVPQSFLKDDSIDNKVLTRSDKNRGKSDNVPSEEVVKKMKNYWRQLLNAKLITQRKFDNLTKAERGGLSELDKAGFIKRQLVETRQITKHVAQILDSRMNTKYDENDKLIREVKVITLKSKLVSDFRKDFQFYKVREINNYHHAHDAYLNAVVGTALIKKYPKLESEFVYGDYKVYDVRKMIAKSEQEIGKATAKYFFYSNIMNFFKTEITLANGEIRKRPLIETNGETGEIVWDKGRDFATVRKVLSMPQVNIVKKTEVQTGGFSKESILPKRNSDKLIARKKDWDPKKYGGFDSPTVAYSVLVVAKVEKGKSKKLKSVKELLGITIMERSSFEKNPIDFLEAKGYKEVKKDLIIKLPKYSLFELENGRKRMLASAGELQKGNELALPSKYVNFLYLASHYEKLKGSPEDNEQKQLFVEQHKHYLDEIIEQISEFSKRVILADANLDKVLSAYNKHRDKPIREQAENIIHLFTLTNLGAPAAFKYFDTTIDRKRYTSTKEVLDATLIHQSITGLYETRIDLSQLGGDA

SEQ ID NO: 440 - protein, 9 aa, Artificial Sequence
  Synthetic Construct
YPYDVPDYA

SEQ ID NO: 441 - protein, 7 aa, Artificial Sequence
  Synthetic Construct
PKKKRKV

SEQ ID NO: 442 - DNA, 60 bp, Artificial Sequence
  Synthetic Construct
gacggcattggtagtgggagcaacggcagcagcggatccaacggtccgactgacgccgcg

SEQ ID NO: 443 - protein, 241 aa, Artificial Sequence
  Synthetic Construct
EEELLSKNYHLENEVARLKKGSGSGEELLSKNYHLENEVARLKKGSGSGEELLSKNYHLENEVARLKKGSGSGEELLSKNYHLENEVARLKKGSGSGEELLSKNYHLENEVARLKKGSGSGEELLSKNYHLENEVARLKKGSGSGEELLSKNYHLENEVARLKKGSGSGEELLSKNYHLENEVARLKKGSGSGEELLSKNYHLENEVARLKKGSGSGEELLSKNYHLENEVARLKKGSGSG

SEQ ID NO: 444 - protein, 1049 aa, Artificial Sequence
  Synthetic Construct
MGPDIVMTQSPSSLSASVGDRVTITCRSSTGAVTTSNYASWVQEKPGKLFKGLIGGTNNRAPGVPSRFSGSLIGDKATLTISSLQPEDFATYFCALWYSNHWVFGQGTKVELKRGGGGSGGGGSGGGGSSGGGSEVKLLESGGGLVQPGGSLKLSCAVSGFSLTDYGVNWVRQAPGRGLEWIGVIWGDGITDYNSALKDRFIISKDNGKNTVYLQMSKVRSDDTALYYCVTGLFDYWGQGTLVTVSSYPYDVPDYAGGGGGSGGGGSGGGGSGGGGSLDPGGGGSGSKGEELFTGVVPILVELDGDVNGHKFSVRGEGEGDATNGKLTLKFICTTGKLPVPWPTLVTTLTYGVQCFSRYPDHMKRHDFFKSAMPEGYVQERTISFKDDGTYKTRAEVKFEGDTLVNRIELKGIDFKEDGNILGHKLEYNFNSHNVYITADKQKNGIKANFKIRHNVEDGSVQLADHYQQNTPIGDGPVLLPDNHYLSTQSVLSKDPNEKRDHMVLLEFVTAAGITHGMDELYKGGGRTGRTGGGGGMYPTGQQISFQTTPLNVQDPTRMMNLDQSSPVARNETQNGGGIAHAEFAMFNSKRLESDLEAMGNKIKQHEDNLKFLKSQKNKMDEAIVDLQVHMSKLNSSPTPRSENSDNSLQGEDINAQILRHENSAAGVLSLVETLHGAQASQLMLTKGVVGVVAKLGKVNDENLSQILSNYLGTRSMLAVVCRNYESVTALEAYDNHGNIDINAGLHCLGSSIGREIGDSFDAICLENLRPYVGQHIADDLQRRLDLLKPKLPNGECPPGFLGFAVNMIQIDPAYLLCVTSYGYGLRETLFYNLFSRLQVYKTRADMISALPCISDGAVSLDGGIIRKTGIFNLGNRDEVNVRFAKPTASRTMDNYSEAEKKMKELKWKKEKTLEDIKREQVLREHAVFNFGKKKEEFVRCLAQSSCTNQPMNTPRRTGGGSRTEEYKLILNGKTLKGETTTEAVDAATAEKVFKQYANDNGVDGEWTYDDATKTFTVTEGGGSGGGTSPKTRRRPRRSQRKRPPTPWP

SEQ ID NO: 445 - protein, 277 aa, Artificial Sequence
  Synthetic Construct
MGPDIVMTQSPSSLSASVGDRVTITCRSSTGAVTTSNYASWVQEKPGKLFKGLIGGTNNRAPGVPSRFSGSLIGDKATLTISSLQPEDFATYFCALWYSNHWVFGQGTKVELKRGGGGSGGGGSGGGGSSGGGSEVKLLESGGGLVQPGGSLKLSCAVSGFSLTDYGVNWVRQAPGRGLEWIGVIWGDGITDYNSALKDRFIISKDNGKNTVYLQMSKVRSDDTALYYCVTGLFDYWGQGTLVTVSSYPYDVPDYAGGGGGSGGGGSGGGGSGGGGS

SEQ ID NO: 446 - protein, 237 aa, Artificial Sequence
  Synthetic Construct
SKGEELFTGVVPILVELDGDVNGHKFSVRGEGEGDATNGKLTLKFICTTGKLPVPWPTLVTTLTYGVQCFSRYPDHMKRHDFFKSAMPEGYVQERTISFKDDGTYKTRAEVKFEGDTLVNRIELKGIDFKEDGNILGHKLEYNFNSHNVYITADKQKNGIKANFKIRHNVEDGSVQLADHYQQNTPIGDGPVLLPDNHYLSTQSVLSKDPNEKRDHMVLLEFVTAAGITHGMDELYK

SEQ ID NO: 447 - protein, 5 aa, Artificial Sequence
  Synthetic Construct
GGGGG

SEQ ID NO: 448 - protein, 420 aa, Artificial Sequence
  Synthetic Construct
MYPTGQQISFQTTPLNVQDPTRMMNLDQSSPVARNETQNGGGIAHAEFAMFNSKRLESDLEAMGNKIKQHEDNLKFLKSQKNKMDEAIVDLQVHMSKLNSSPTPRSENSDNSLQGEDINAQILRHENSAAGVLSLVETLHGAQASQLMLTKGVVGVVAKLGKVNDENLSQILSNYLGTRSMLAVVCRNYESVTALEAYDNHGNIDINAGLHCLGSSIGREIGDSFDAICLENLRPYVGQHIADDLQRRLDLLKPKLPNGECPPGFLGFAVNMIQIDPAYLLCVTSYGYGLRETLFYNLFSRLQVYKTRADMISALPCISDGAVSLDGGIIRKTGIFNLGNRDEVNVRFAKPTASRTMDNYSEAEKKMKELKWKKEKTLEDIKREQVLREHAVFNFGKKKEEFVRCLAQSSCTNQPMNTPR

SEQ ID NO: 449 - protein, 55 aa, Artificial Sequence
  Synthetic Construct
EYKLILNGKTLKGETTTEAVDAATAEKVFKQYANDNGVDGEWTYDDATKTFTVTE

SEQ ID NO: 450 - protein, 20 aa, Artificial Sequence
  Synthetic Construct
PKTRRRPRRSQRKRPPTPWP

SEQ ID NO: 451 - DNA, 11212 bp, Artificial Sequence
  Synthetic Construct
  misc_feature 11087, 11088, 11089, 11090, 11091, 11092, 11093, 11094, 11095,11096, 11097, 11098, 11099, 11100, 11101, 11102, 11103,11104, 11105, 11106: n = A,T,C or G
atgcatatgagtctagctcaacagagcttttaacccaaattggtacaatagaatacaactttagatcataattctcaaaagaaagagattccttagctattctatctgccactccatttccttctcggcttgtatgcacaagcataaaatcctcaaacttgctaagtagatactttatgtcttggataattggattgagacttgacaagcataactttcatgtaaccaaagacacaagttgctgagaatccacctcaaaaatgatcttcctataattgaatcgggataatgacagcacagcccatctaagagcctccacttctacttccagcacgcttcttacttttaccacagctcttgcacctaaccataacaccttccctgtatgatcgcgaagcacccaccctaagccacattttaatccttctgttggccatgccccatcaaagttgcacttaacccaagattgtggtggagcttcccatgtttctcgtctgtcccgacggtgttgtggttggtgctttccttacattctgagcctctttccttctaatccactcatctgcatcttcttgtgtccttactaatacctcattggttccaaattccctccctttaagcaccagctcgtttctgttcttccacagcctcccaagtatccaagggactaaagcctccacattcttcagatcaggatattcttgtttaagatgttgaactctatggaggtttgtatgaactgatgatctaggaccggataagttcccttcttcatagcgaacttattcaaagaatgttttgtgtatcattcttgttacattgttattaatgaaaaaatattattggtcattggactgaacacgagtgttaaatatggaccaggccccaaataagatccattgatatatgaattaaataacaagaataaatcgagtcaccaaaccacttgccttttttaacgagacttgttcaccaacttgatacaaaagtcattatcctatgcaaatcaataatcatacaaaaatatccaataacactaaaaaattaaaagaaatggataatttcacaatatgttatacgataaagaagttacttttccaagaaattcactgattttataagcccacttgcattagataaatggcaaaaaaaaacaaaaaggaaaagaaataaagcacgaagaattctagaaaatacgaaatacgcttcaatgcagtgggacccacggttcaattattgccaattttcagctccaccgtatatttaaaaaataaaacgataatgctaaaaaaatataaatcgtaacgatcgttaaatctcaacggctggatcttatgacgaccgttagaaattgtggttgtcgacgagtcagtaataaacggcgtcaaagtggttgcagccggcacacacgagtcgtgtttatcaactcaaagcacaaatacttttcctcaacctaaaaataaggcaattagccaaaaacaactttgcgtgtaaacaacgctcaatacacgtgtcattttattattagctattgcttcaccgccttagctttctcgtgacctagtcgtcctcgtcttttcttcttcttcttctataaaacaatacccaaagagctcttcttcttcacaattcagatttcaatttctcaaaatcttaaaaactttctctcaattctctctaccgtgatcaaggtaaatttctgtgttccttattctctcaaaatcttcgattttgttttcgttcgatcccaatttcgtatatgttctttggtttagattctgttaatcttagatcgaagacgattttctgggtttgatcgttagatatcatcttaattctcgattagggtttcatagatatcatccgatttgttcaaataatttgagttttgtcgaataattactcttcgatttgtgatttctatctagatctggtgttagtttctagtttgtgcgatcgaatttgtcgattaatctgagtttttctgattaacagggatcatcaacaagtttgtacaaaaaagcaggctctttaaagtatttttacaacaattaccaacaacaacaaacaacaaacaacattacaattactatttacaattacaaaaaaagttaacatggacaaaaaatacagcattgggttggccattgggacaaatagcgtgggttgggcagtcattacagacgaatacaaggttcctagcaagaagttcaaggtgttgggcaacactgacaggcactcgatcaagaaaaatctcattggtgcactccttttcgatagtggggagactgccgaagcgaccagactgaaaaggactgctagaaggcgctatacccggcgtaagaatcgcatttgctacctccaggagatattctctaacgaaatggccaaggttgatgacagcttctttcatcgcttggaggaatcattcctcgtcgaggaagacaagaaacacgagcggcatccgatctttggaaacattgttgatgaggtcgcatatcacgaaaagtaccccacgatctaccatcttcgcaagaaactggtggattcaactgacaaggctgatctgcggttgatatacctcgcacttgctcacatgatcaagttccgtggccattttcttattgagggagacctgaaccctgataattctgacgtcgataagttgttcatccagctcgtgcaaacatacaatcagctctttgaggaaaaccctatcaacgcctctggagttgatgccaaagcgatcctttccgcgaggctgtcgaagagtagaaggctggagaacttgatcgcccaacttcctggcgaaaagaaaaacggtttgttcgggaatctcattgcgctgagcttgggactcacgccaaacttcaagtctaacttcgacctcgcagaggatgctaaacttcagctgtccaaggatacttatgatgacgatcttgacaacctgttggcacaaatcggtgaccagtacgctgatttgttcctcgctgccaagaacctcagcgatgccatactcctttcagacatcctccgcgtgaacactgagattaccaaagcacctctgtctgcttccatgataaagcgttatgatgagcaccatcaagacctcactctgttgaaggcgttggttagacagcaactcccagagaagtacaaagaaatcttctttgaccaatctaagaatggctacgccggatatattgatggcggagcgtcccaggaggagttctacaagtttatcaaacctattcttgagaagatggatggtacggaggaactccttgttaaactgaatagagaggatctcttgcgcaagcaacggactttcgacaacggcagcataccgcaccagatccatctcggagagcttcacgccatccttcgccggcaggaagatttctacccctttctgaaggacaaccgtgagaagatcgaaaaaatccttactttcagaatcccttactatgtcggtccactggctagaggcaactctagatttgcttggatgacacgcaagagtgaggaaactatcaccccttggaacttcgaggaagtggttgacaagggcgcatcggctcaaagtttcattgagagaatgactaattttgataagaaccttccgaacgagaaagtcctgcccaagcattcactcctttacgagtatttcacagtgtataacgaacttacgaaggtgaaatacgttactgagggtatgcggaagccggcattcctgtcgggggaacaaaagaaagctatagtggatctgttgtttaaaactaacaggaaggttaccgtcaagcagcttaaggaggattacttcaagaaaatagaatgttttgactcggtggagatcagtggcgttgaagatagattcaacgcttcactgggaacctaccacgacctccttaagatcattaaggacaaagatttcttggataacgaggaaaatgaggacattctcgaagatatagtccttacactgacgttgtttgaggaccgtgaaatgatcgaggaaagattgaagacctatgctcatctcttcgacgataaggttatgaagcagctcaagcgtagaaggtacacaggttgggggcgtctttctagaaagctgattaatggcataagggataaacaatctggaaagacgattctggatttcctcaagtccgacggcttcgccaaccgcaattttatgcagcttatacacgacgattccctgactttcaaagaggacatccagaaggcccaagttagcggccaaggagattcacttcacgagcatatcgccaacctggcgggtagcccggcgatcaagaaagggattcttcagaccgtcaaggtcgtggatgagctggtgaaagttatgggccggcataagcccgaaaacatagtgatcgagatggcccgtgaaaatcagactacccaaaaaggacagaagaactcccgcgagcggatgaaaaggatagaggaaggcatcaaggaacttggaagccagatcctgaaggagcacccagttgaaaacacacagttgcaaaatgagaagctctatctttactatctccaaaatggtagagacatgtatgtggatcaggagttggacattaacaggctctcagactacgatgtcgacgctatcgtgccgcaatcgttccttaaggacgatagtatagataataaggtgctgactcggtcggataaaaaccgtggcaagtcggacaatgttcccagtgaggaagttgtgaagaagatgaagaactactggcgccaactgttgaatgcaaaattgatcacccagaggaagtttgacaacctcacaaaagcagagcgcggtgggctcagtgaacttgataaagctggattcattaagaggcaacttgttgagacacgccagattacgaagcacgtcgcgcagatactggattctaggatgaacaccaagtacgacgagaatgataaattgatcagagaagtgaaggttatcacattgaagtctaaactcgtgtccgattttcgcaaagacttccaattttataaggttcgggagatcaacaattatcaccatgcacatgatgcttacctcaacgccgtggttggtacggcgttgattaagaaatacccgaagctggagtctgagttcgtgtacggggattataaggtctacgacgtgaggaaaatgatcgctaagagtgagcaggaaattggtaaagccaccgcgaagtatttcttttactctaacatcatgaacttcttcaagacagagataacgttggcaaatggtgaaatacgtaagagacctctcatcgagactaacggtgaaaccggggaaatcgtttgggataaagggcgggactttgctactgttcgtaaggtcctctccatgccgcaagtgaatattgttaagaaaacagaggtccagacgggcggattctctaaggaatccatccttcccaaaagaaacagcgacaagctgattgcgaggaagaaagattgggaccctaagaaatatggtgggttcgattctccaaccgttgcctactccgtcttggtcgtggcgaaggttgagaagggtaaatctaagaaactcaaatccgtcaaggaactccttgggattactatcatggagaggtcttccttcgaaaagaatcctatcgatttccttgaggctaaaggctataaggaagtgaagaaggatctcatcatcaagctcccaaagtacagcctgtttgagttggaaaacggaaggaagcgcatgttggcatcagctggagagctccagaaagggaacgagctggccttgccttctaagtatgtgaacttcctctatcttgcgtcgcactacgagaagctgaaaggcagtccagaggacaacgaacagaaacaactttttgttgagcaacacaagcattatctggatgagattatagaacagatcagcgagttctcaaaaagagtcattcttgccgatgctaacctcgacaaggtgctctccgcatacaacaaacacagagacaagccgatcagggagcaggctgaaaatatcattcatctcttcactcttaccaacctgggtgcccccgcggcattcaagtattttgatacaacgattgaccggaaacgttacacaagcacgaaggaggtccttgatgcgaccctgattcatcaaagcataacagggctctatgagacgagaatcgatttgtcacagctcggcggagactacccgtatgacgtgcccgattacgctgccgcggcagctgagttcaagcgcgaggaacaggcccggaaggcgaaagtgaacaatgagaagaaaacagaaatcgttaaacctgagagctgctcaaacgagggagacgttaaggatcttaagaggaaagactctgaggatggcaacgaaggagaggaagaggaagctagctcaaaacctaagaaaccaaaggtggcactctcacatctccaagacattgacgacaccgaagcagaccaagaagaagaaccctcaggttcggaaactccggggacctctgaatccgcgacaccggaatcacccgggatgtatccgactggtcaacagatttcgtttcagaccactccgttgaatgttcaagatccaacaaggatgatgaatttggatcaatcttcaccagttgcaagaaatgaaactcagaatggaggaggcattgctcacgctgagtttgctatgttcaattccaagaggcttgaatctgatcttgaagctatgggtaacaaaatcaaacagcatgaggataatctcaagtttctcaagtctcagaaaaacaaaatggatgaagctatcgtcgacttgcaagttcatatgagtaagcttaactcgtctcctactcctagaagtgaaaactctgataacagtcttcagggtgaagatatcaatgcacagatccttcgccacgaaaactcagctgctggagttttaagtctggttgagactcttcatggtgctcaagcttctcagttgatgttgacaaaaggtgttgttggtgttgtagcgaaacttgggaaggtcaatgatgaaaatctcagccagattttgtcgaattatttggggactcgctcaatgttggcagttgtatgcaggaattatgaaagtgttacggctttagaggcttatgataaccatggcaacattgatataaatgctggccttcattgccttggctcttcgattggaagagagattggagacagttttgatgccatctgccttgaaaacctgaggccgtatgttggtcagcacatagctgatgatctgcaaagaaggcttgatcttctgaaaccaaaattacctaatggtgagtgtcctcccgggtttctcggatttgcagtgaatatgatacagatcgatccagcttacttgctctgtgtcacatcatatggatatggtcttcgtgagaccttgttctacaatctattctctcgccttcaagtttacaaaacaagggccgatatgattagtgccctcccatgcataagtgatggtgcggtatctttggatggaggaatcatcaggaaaacggggatcttcaatcttggaaaccgtgatgaggtgaacgtgagatttgcaaagccaactgcttctcgcacgatggacaactatagtgaggcggagaagaaaatgaaagagctgaaatggaaaaaggagaaaacgctggaggacattaagcgggagcaagtgctccgtgagcatgccgtcttcaactttggcaagaagaaagaagaatttgttcgatgcttggctcagagttcatgcactaatcagccaatgaacacacccagatgacccgggggcgcgccatgataactagagtcctgctttaatgagatatgcgagacgcctatgatcgcatgatatttgctttcaattctgttgtgcacgttgtaaaaaacctgagcatgtgtagctcagatccttaccgccggtttcggttcattctaatgaatatatcacccgttactatcgtatttttatgaataatattctccgttcaatttactgattgtaccctactacttatatgtacaatattaaaatgaaaacaatatattgtgctgaataggtttatagcgacatctatgatagagcgccacaataacaaacaattgcgttttattattacaaatccaattttaaaaaaagcggcagaaccggtcaaacctaaaagactgattacataaatcttattcaaatttcaaaagtgccccaggggctagtatctacgacacaccgagcggcgaactaataacgttcactgaagggaactccggttccccgccggcgcgcatgggtgagattccttgaagttgagtattggccgtccgctctaccgaaagttacgggcaccattcaacccggtccagcacggcggccgggtaaccgacttgctgccccgagaattatgcagcatttttttggtgtatgtgggccccaaatgaagtgcaggtcaaaccttgacagtgacgacaaatcgttgggcgggtccagggcgaattttgcgacaacatgtcgaggctcagcaggaccggcatgcaagctagcttactagtgatattctatagtgtcacctaaatctgcggccgcttcctaacacctggagaaccttttatgtacttcacaaccctcaatgctgcttccaggtgtgactgtttgggttgctgcatgaattgactcagcacctgcactgcaaagctgatatctggccttgtgattgtcaagtagagaagctttcccaccagtctctgataggatcccacatcctctaactctgcatcatcagtctttcctaagtgcttgtcatattctacagtagtcagcctttggttctgttccattggggttgacactggtctgcagcctcccagaccaacacctgatatcagttccagtgcatacttcctctggttcagtaggattcccttttctgatctcagcacctcaatgcctaagaagtattttagttctcccaaatctttcatcttgaaatgctgatgcagggttgcctttgcttctgaaatcaaaacattgctgctgcctgttattaacagatcatccacataaatcaggattatgacaaggtcagtcccctctcttttggtaaacaaggagtgatcataagcactttgcataaaaccagcctgcataaggacagtggtaagcttgatgttccactgccttgatgcttgctttaaaccatagagggattcaacagcctgcacactttggtctccccttggctgtgaaaaccctgaggcagagacatataaacttcttccatgaggtcaccttgtagaaaagcattgttgacatccatctggaaaaggaaccagcccttggaagcagcaacagatatgacagcttttacagtgaccattttggccactggagaaaaagtttcatggtagtcaaggccttcttgctgagtgtatcccttggccactagccttgccttaaacctgtcaacttcaccattagctttgtatttaattttgtacacccatttggaccctataggctgtttaccagggggtaaagggacaatctcccaggtgttattatcctcaagagcctgtatctcaagggacatggcctccatccatttctcatcttgagctgcttctttgaaggatttaggttcagtataagtggagaaagcactcaaataagcttgatagtgaacaggcaagtgatcataggaaacatagttggctatagggtatggaacatccctagagcctttgttcagtgtcacaaagtccttgagccagatgggaggacctgcattgcgtttaggtctagtgtgcaggtttgctggaactagagagggatcagctacagcagtatggtgctcaaattcagcatttgctaggtcaggctcagctgactcaactgactctgcaggagcatgcaggtggcctgaaggtgcagcatcagctgaagtgatatgattttgggtagaatgagtccccaaagtgatatcctcattggcctctacaatgtcaggaataagaactggagtatcatcatcatcagtatgaaagctggaaggaaaaatatcattatacactagctgcaaagctgtatcttcagagctaagtgaacctgctcgagtgaacatatcaggttcatgggagatggactctttgaaagggaactgaaactctctgaaaactacatccctgctcactatgatcaccttattatccaagtcatacaacctgtaacccttttgagtctcagaataaccaatgaagatggttcgcttggctctaggtgcaagtttgtcacctttgggcagtgttgctgcaaaagcaagacacccaaacactctcaagtgatcaagcttggcatgtttctgatagagtagttcatatggacatttgccttgtaagattggagtagggagtctattgatcaggtatacaacagtcttgacacagtctccccaaaacctggtaggtacaccactctgaaacttaagtgcccttgccatctcaaggatgtgtctgtgctttctctccacaacaccattctgttgtggtgtgtagggacagctactttgatgaacaatcccaagagaggccagcaactcattacaacttgtttaagctttcgttgaacaacggaaactcgacttgccttccgcacaatacatcatttcttcttagctttttttcttcttcttcgttcatacagtttttttttgtttatcagcttacattttcttgaaccgtagctttcgttttcttctttttaactttccattcggagtttttgtatcttgtttcatagtttgtcccaggattagaatgattaggcatcgaaccttcaagaatttgattgaataaaacatcttcattcttaagatatgaagataatcttcaaaaggcccctgggaatctgaaagaagagaagcaggcccatttatatgggaaagaacaatagtatttcttatataggcccatttaagttgaaaacaatcttcaaaagtcccacatcgcttagataagaaaacgaagctgagtttatatacagctagagtcgaagtagtgattgnnnnnnnnnnnnnnnnnnnngttttagagctagaaatagcaagttaaaataaggctagtccgttatcaacttgaaaaagtggcaccgagtcggtgctttttttgtttaaacaaaccaccccgtgtc

SEQ ID NO: 452 - DNA, 1995 bp, Artificial Sequence
  Synthetic Construct
atgcatatgagtctagctcaacagagcttttaacccaaattggtacaatagaatacaactttagatcataattctcaaaagaaagagattccttagctattctatctgccactccatttccttctcggcttgtatgcacaagcataaaatcctcaaacttgctaagtagatactttatgtcttggataattggattgagacttgacaagcataactttcatgtaaccaaagacacaagttgctgagaatccacctcaaaaatgatcttcctataattgaatcgggataatgacagcacagcccatctaagagcctccacttctacttccagcacgcttcttacttttaccacagctcttgcacctaaccataacaccttccctgtatgatcgcgaagcacccaccctaagccacattttaatccttctgttggccatgccccatcaaagttgcacttaacccaagattgtggtggagcttcccatgtttctcgtctgtcccgacggtgttgtggttggtgctttccttacattctgagcctctttccttctaatccactcatctgcatcttcttgtgtccttactaatacctcattggttccaaattccctccctttaagcaccagctcgtttctgttcttccacagcctcccaagtatccaagggactaaagcctccacattcttcagatcaggatattcttgtttaagatgttgaactctatggaggtttgtatgaactgatgatctaggaccggataagttcccttcttcatagcgaacttattcaaagaatgttttgtgtatcattcttgttacattgttattaatgaaaaaatattattggtcattggactgaacacgagtgttaaatatggaccaggccccaaataagatccattgatatatgaattaaataacaagaataaatcgagtcaccaaaccacttgccttttttaacgagacttgttcaccaacttgatacaaaagtcattatcctatgcaaatcaataatcatacaaaaatatccaataacactaaaaaattaaaagaaatggataatttcacaatatgttatacgataaagaagttacttttccaagaaattcactgattttataagcccacttgcattagataaatggcaaaaaaaaacaaaaaggaaaagaaataaagcacgaagaattctagaaaatacgaaatacgcttcaatgcagtgggacccacggttcaattattgccaattttcagctccaccgtatatttaaaaaataaaacgataatgctaaaaaaatataaatcgtaacgatcgttaaatctcaacggctggatcttatgacgaccgttagaaattgtggttgtcgacgagtcagtaataaacggcgtcaaagtggttgcagccggcacacacgagtcgtgtttatcaactcaaagcacaaatacttttcctcaacctaaaaataaggcaattagccaaaaacaactttgcgtgtaaacaacgctcaatacacgtgtcattttattattagctattgcttcaccgccttagctttctcgtgacctagtcgtcctcgtcttttcttcttcttcttctataaaacaatacccaaagagctcttcttcttcacaattcagatttcaatttctcaaaatcttaaaaactttctctcaattctctctaccgtgatcaaggtaaatttctgtgttccttattctctcaaaatcttcgattttgttttcgttcgatcccaatttcgtatatgttctttggtttagattctgttaatcttagatcgaagacgattttctgggtttgatcgttagatatcatcttaattctcgattagggtttcatagatatcatccgatttgttcaaataatttgagttttgtcgaataattactcttcgatttgtgatttctatctagatctggtgttagtttctagtttgtgcgatcgaatttgtcgattaatctgagtttttctgattaacag

SEQ ID NO: 453 - DNA, 121 bp, Artificial Sequence
  Synthetic Construct
ggatcatcaacaagtttgtacaaaaaagcaggctctttaaagtatttttacaacaattaccaacaacaacaaacaacaaacaacattacaattactatttacaattacaaaaaaagttaac

SEQ ID NO: 454 - DNA, 4101 bp, Artificial Sequence
  Synthetic Construct
atggacaaaaaatacagcattgggttggccattgggacaaatagcgtgggttgggcagtcattacagacgaatacaaggttcctagcaagaagttcaaggtgttgggcaacactgacaggcactcgatcaagaaaaatctcattggtgcactccttttcgatagtggggagactgccgaagcgaccagactgaaaaggactgctagaaggcgctatacccggcgtaagaatcgcatttgctacctccaggagatattctctaacgaaatggccaaggttgatgacagcttctttcatcgcttggaggaatcattcctcgtcgaggaagacaagaaacacgagcggcatccgatctttggaaacattgttgatgaggtcgcatatcacgaaaagtaccccacgatctaccatcttcgcaagaaactggtggattcaactgacaaggctgatctgcggttgatatacctcgcacttgctcacatgatcaagttccgtggccattttcttattgagggagacctgaaccctgataattctgacgtcgataagttgttcatccagctcgtgcaaacatacaatcagctctttgaggaaaaccctatcaacgcctctggagttgatgccaaagcgatcctttccgcgaggctgtcgaagagtagaaggctggagaacttgatcgcccaacttcctggcgaaaagaaaaacggtttgttcgggaatctcattgcgctgagcttgggactcacgccaaacttcaagtctaacttcgacctcgcagaggatgctaaacttcagctgtccaaggatacttatgatgacgatcttgacaacctgttggcacaaatcggtgaccagtacgctgatttgttcctcgctgccaagaacctcagcgatgccatactcctttcagacatcctccgcgtgaacactgagattaccaaagcacctctgtctgcttccatgataaagcgttatgatgagcaccatcaagacctcactctgttgaaggcgttggttagacagcaactcccagagaagtacaaagaaatcttctttgaccaatctaagaatggctacgccggatatattgatggcggagcgtcccaggaggagttctacaagtttatcaaacctattcttgagaagatggatggtacggaggaactccttgttaaactgaatagagaggatctcttgcgcaagcaacggactttcgacaacggcagcataccgcaccagatccatctcggagagcttcacgccatccttcgccggcaggaagatttctacccctttctgaaggacaaccgtgagaagatcgaaaaaatccttactttcagaatcccttactatgtcggtccactggctagaggcaactctagatttgcttggatgacacgcaagagtgaggaaactatcaccccttggaacttcgaggaagtggttgacaagggcgcatcggctcaaagtttcattgagagaatgactaattttgataagaaccttccgaacgagaaagtcctgcccaagcattcactcctttacgagtatttcacagtgtataacgaacttacgaaggtgaaatacgttactgagggtatgcggaagccggcattcctgtcgggggaacaaaagaaagctatagtggatctgttgtttaaaactaacaggaaggttaccgtcaagcagcttaaggaggattacttcaagaaaatagaatgttttgactcggtggagatcagtggcgttgaagatagattcaacgcttcactgggaacctaccacgacctccttaagatcattaaggacaaagatttcttggataacgaggaaaatgaggacattctcgaagatatagtccttacactgacgttgtttgaggaccgtgaaatgatcgaggaaagattgaagacctatgctcatctcttcgacgataaggttatgaagcagctcaagcgtagaaggtacacaggttgggggcgtctttctagaaagctgattaatggcataagggataaacaatctggaaagacgattctggatttcctcaagtccgacggcttcgccaaccgcaattttatgcagcttatacacgacgattccctgactttcaaagaggacatccagaaggcccaagttagcggccaaggagattcacttcacgagcatatcgccaacctggcgggtagcccggcgatcaagaaagggattcttcagaccgtcaaggtcgtggatgagctggtgaaagttatgggccggcataagcccgaaaacatagtgatcgagatggcccgtgaaaatcagactacccaaaaaggacagaagaactcccgcgagcggatgaaaaggatagaggaaggcatcaaggaacttggaagccagatcctgaaggagcacccagttgaaaacacacagttgcaaaatgagaagctctatctttactatctccaaaatggtagagacatgtatgtggatcaggagttggacattaacaggctctcagactacgatgtcgacgctatcgtgccgcaatcgttccttaaggacgatagtatagataataaggtgctgactcggtcggataaaaaccgtggcaagtcggacaatgttcccagtgaggaagttgtgaagaagatgaagaactactggcgccaactgttgaatgcaaaattgatcacccagaggaagtttgacaacctcacaaaagcagagcgcggtgggctcagtgaacttgataaagctggattcattaagaggcaacttgttgagacacgccagattacgaagcacgtcgcgcagatactggattctaggatgaacaccaagtacgacgagaatgataaattgatcagagaagtgaaggttatcacattgaagtctaaactcgtgtccgattttcgcaaagacttccaattttataaggttcgggagatcaacaattatcaccatgcacatgatgcttacctcaacgccgtggttggtacggcgttgattaagaaatacccgaagctggagtctgagttcgtgtacggggattataaggtctacgacgtgaggaaaatgatcgctaagagtgagcaggaaattggtaaagccaccgcgaagtatttcttttactctaacatcatgaacttcttcaagacagagataacgttggcaaatggtgaaatacgtaagagacctctcatcgagactaacggtgaaaccggggaaatcgtttgggataaagggcgggactttgctactgttcgtaaggtcctctccatgccgcaagtgaatattgttaagaaaacagaggtccagacgggcggattctctaaggaatccatccttcccaaaagaaacagcgacaagctgattgcgaggaagaaagattgggaccctaagaaatatggtgggttcgattctccaaccgttgcctactccgtcttggtcgtggcgaaggttgagaagggtaaatctaagaaactcaaatccgtcaaggaactccttgggattactatcatggagaggtcttccttcgaaaagaatcctatcgatttccttgaggctaaaggctataaggaagtgaagaaggatctcatcatcaagctcccaaagtacagcctgtttgagttggaaaacggaaggaagcgcatgttggcatcagctggagagctccagaaagggaacgagctggccttgccttctaagtatgtgaacttcctctatcttgcgtcgcactacgagaagctgaaaggcagtccagaggacaacgaacagaaacaactttttgttgagcaacacaagcattatctggatgagattatagaacagatcagcgagttctcaaaaagagtcattcttgccgatgctaacctcgacaaggtgctctccgcatacaacaaacacagagacaagccgatcagggagcaggctgaaaatatcattcatctcttcactcttaccaacctgggtgcccccgcggcattcaagtattttgatacaacgattgaccggaaacgttacacaagcacgaaggaggtccttgatgcgaccctgattcatcaaagcataacagggctctatgagacgagaatcgatttgtcacagctcggcgga

SEQ ID NO: 455 - DNA, 27 bp, Artificial Sequence
  Synthetic Construct
gactacccgtatgacgtgcccgattac

SEQ ID NO: 456 - DNA, 252 bp, Artificial Sequence
  Synthetic Construct
gctgccgcggcagctgagttcaagcgcgaggaacaggcccggaaggcgaaagtgaacaatgagaagaaaacagaaatcgttaaacctgagagctgctcaaacgagggagacgttaaggatcttaagaggaaagactctgaggatggcaacgaaggagaggaagaggaagctagctcaaaacctaagaaaccaaaggtggcactctcacatctccaagacattgacgacaccgaagcagaccaagaagaagaa

SEQ ID NO: 457 - DNA, 48 bp, Artificial Sequence
  Synthetic Construct
tcaggttcggaaactccggggacctctgaatccgcgacaccggaatca

SEQ ID NO: 458 - DNA, 1263 bp, Artificial Sequence
  Synthetic Construct
atgtatccgactggtcaacagatttcgtttcagaccactccgttgaatgttcaagatccaacaaggatgatgaatttggatcaatcttcaccagttgcaagaaatgaaactcagaatggaggaggcattgctcacgctgagtttgctatgttcaattccaagaggcttgaatctgatcttgaagctatgggtaacaaaatcaaacagcatgaggataatctcaagtttctcaagtctcagaaaaacaaaatggatgaagctatcgtcgacttgcaagttcatatgagtaagcttaactcgtctcctactcctagaagtgaaaactctgataacagtcttcagggtgaagatatcaatgcacagatccttcgccacgaaaactcagctgctggagttttaagtctggttgagactcttcatggtgctcaagcttctcagttgatgttgacaaaaggtgttgttggtgttgtagcgaaacttgggaaggtcaatgatgaaaatctcagccagattttgtcgaattatttggggactcgctcaatgttggcagttgtatgcaggaattatgaaagtgttacggctttagaggcttatgataaccatggcaacattgatataaatgctggccttcattgccttggctcttcgattggaagagagattggagacagttttgatgccatctgccttgaaaacctgaggccgtatgttggtcagcacatagctgatgatctgcaaagaaggcttgatcttctgaaaccaaaattacctaatggtgagtgtcctcccgggtttctcggatttgcagtgaatatgatacagatcgatccagcttacttgctctgtgtcacatcatatggatatggtcttcgtgagaccttgttctacaatctattctctcgccttcaagtttacaaaacaagggccgatatgattagtgccctcccatgcataagtgatggtgcggtatctttggatggaggaatcatcaggaaaacggggatcttcaatcttggaaaccgtgatgaggtgaacgtgagatttgcaaagccaactgcttctcgcacgatggacaactatagtgaggcggagaagaaaatgaaagagctgaaatggaaaaaggagaaaacgctggaggacattaagcgggagcaagtgctccgtgagcatgccgtcttcaactttggcaagaagaaagaagaatttgttcgatgcttggctcagagttcatgcactaatcagccaatgaacacacccagatga

SEQ ID NO: 459 - DNA, 780 bp, Artificial Sequence
  Synthetic Construct
taactagagtcctgctttaatgagatatgcgagacgcctatgatcgcatgatatttgctttcaattctgttgtgcacgttgtaaaaaacctgagcatgtgtagctcagatccttaccgccggtttcggttcattctaatgaatatatcacccgttactatcgtatttttatgaataatattctccgttcaatttactgattgtaccctactacttatatgtacaatattaaaatgaaaacaatatattgtgctgaataggtttatagcgacatctatgatagagcgccacaataacaaacaattgcgttttattattacaaatccaattttaaaaaaagcggcagaaccggtcaaacctaaaagactgattacataaatcttattcaaatttcaaaagtgccccaggggctagtatctacgacacaccgagcggcgaactaataacgttcactgaagggaactccggttccccgccggcgcgcatgggtgagattccttgaagttgagtattggccgtccgctctaccgaaagttacgggcaccattcaacccggtccagcacggcggccgggtaaccgacttgctgccccgagaattatgcagcatttttttggtgtatgtgggccccaaatgaagtgcaggtcaaaccttgacagtgacgacaaatcgttgggcgggtccagggcgaattttgcgacaacatgtcgaggctcagcaggaccggcatgcaagctagcttactagtgatattctatagtgtcacctaaatctgcggccgc

SEQ ID NO: 460 - DNA, 2018 bp, Artificial Sequence; identical to SEQ ID NO: 434
  Synthetic Construct

SEQ ID NO: 461 - DNA, 580 bp, Artificial Sequence
  Synthetic Construct
  misc_feature 455, 456, 457, 458, 459, 460, 461, 462, 463, 464, 465, 466,467, 468, 469, 470, 471, 472, 473, 474: n = A,T,C or G
gtttaagctttcgttgaacaacggaaactcgacttgccttccgcacaatacatcatttcttcttagctttttttcttcttcttcgttcatacagtttttttttgtttatcagcttacattttcttgaaccgtagctttcgttttcttctttttaactttccattcggagtttttgtatcttgtttcatagtttgtcccaggattagaatgattaggcatcgaaccttcaagaatttgattgaataaaacatcttcattcttaagatatgaagataatcttcaaaaggcccctgggaatctgaaagaagagaagcaggcccatttatatgggaaagaacaatagtatttcttatataggcccatttaagttgaaaacaatcttcaaaagtcccacatcgcttagataagaaaacgaagctgagtttatatacagctagagtcgaagtagtgattgnnnnnnnnnnnnnnnnnnnngttttagagctagaaatagcaagttaaaataaggctagtccgttatcaacttgaaaaagtggcaccgagtcggtgctttttttgtttaaacaaaccaccccgtgtc

SEQ ID NO: 462 - DNA, 11209 bp, Artificial Sequence
  Synthetic Construct
  misc_feature 11084, 11085, 11086, 11087, 11088, 11089, 11090, 11091, 11092,11093, 11094, 11095, 11096, 11097, 11098, 11099, 11100,11101, 11102, 11103: n = A,T,C or G
atgcatatgagtctagctcaacagagcttttaacccaaattggtacaatagaatacaactttagatcataattctcaaaagaaagagattccttagctattctatctgccactccatttccttctcggcttgtatgcacaagcataaaatcctcaaacttgctaagtagatactttatgtcttggataattggattgagacttgacaagcataactttcatgtaaccaaagacacaagttgctgagaatccacctcaaaaatgatcttcctataattgaatcgggataatgacagcacagcccatctaagagcctccacttctacttccagcacgcttcttacttttaccacagctcttgcacctaaccataacaccttccctgtatgatcgcgaagcacccaccctaagccacattttaatccttctgttggccatgccccatcaaagttgcacttaacccaagattgtggtggagcttcccatgtttctcgtctgtcccgacggtgttgtggttggtgctttccttacattctgagcctctttccttctaatccactcatctgcatcttcttgtgtccttactaatacctcattggttccaaattccctccctttaagcaccagctcgtttctgttcttccacagcctcccaagtatccaagggactaaagcctccacattcttcagatcaggatattcttgtttaagatgttgaactctatggaggtttgtatgaactgatgatctaggaccggataagttcccttcttcatagcgaacttattcaaagaatgttttgtgtatcattcttgttacattgttattaatgaaaaaatattattggtcattggactgaacacgagtgttaaatatggaccaggccccaaataagatccattgatatatgaattaaataacaagaataaatcgagtcaccaaaccacttgccttttttaacgagacttgttcaccaacttgatacaaaagtcattatcctatgcaaatcaataatcatacaaaaatatccaataacactaaaaaattaaaagaaatggataatttcacaatatgttatacgataaagaagttacttttccaagaaattcactgattttataagcccacttgcattagataaatggcaaaaaaaaacaaaaaggaaaagaaataaagcacgaagaattctagaaaatacgaaatacgcttcaatgcagtgggacccacggttcaattattgccaattttcagctccaccgtatatttaaaaaataaaacgataatgctaaaaaaatataaatcgtaacgatcgttaaatctcaacggctggatcttatgacgaccgttagaaattgtggttgtcgacgagtcagtaataaacggcgtcaaagtggttgcagccggcacacacgagtcgtgtttatcaactcaaagcacaaatacttttcctcaacctaaaaataaggcaattagccaaaaacaactttgcgtgtaaacaacgctcaatacacgtgtcattttattattagctattgcttcaccgccttagctttctcgtgacctagtcgtcctcgtcttttcttcttcttcttctataaaacaatacccaaagagctcttcttcttcacaattcagatttcaatttctcaaaatcttaaaaactttctctcaattctctctaccgtgatcaaggtaaatttctgtgttccttattctctcaaaatcttcgattttgttttcgttcgatcccaatttcgtatatgttctttggtttagattctgttaatcttagatcgaagacgattttctgggtttgatcgttagatatcatcttaattctcgattagggtttcatagatatcatccgatttgttcaaataatttgagttttgtcgaataattactcttcgatttgtgatttctatctagatctggtgttagtttctagtttgtgcgatcgaatttgtcgattaatctgagtttttctgattaacagggatcatcaacaagtttgtacaaaaaagcaggctctttaaagtatttttacaacaattaccaacaacaacaaacaacaaacaacattacaattactatttacaattacaaaaaaagttaacatggacaaaaaatacagcattgggttggccattgggacaaatagcgtgggttgggcagtcattacagacgaatacaaggttcctagcaagaagttcaaggtgttgggcaacactgacaggcactcgatcaagaaaaatctcattggtgcactccttttcgatagtggggagactgccgaagcgaccagactgaaaaggactgctagaaggcgctatacccggcgtaagaatcgcatttgctacctccaggagatattctctaacgaaatggccaaggttgatgacagcttctttcatcgcttggaggaatcattcctcgtcgaggaagacaagaaacacgagcggcatccgatctttggaaacattgttgatgaggtcgcatatcacgaaaagtaccccacgatctaccatcttcgcaagaaactggtggattcaactgacaaggctgatctgcggttgatatacctcgcacttgctcacatgatcaagttccgtggccattttcttattgagggagacctgaaccctgataattctgacgtcgataagttgttcatccagctcgtgcaaacatacaatcagctctttgaggaaaaccctatcaacgcctctggagttgatgccaaagcgatcctttccgcgaggctgtcgaagagtagaaggctggagaacttgatcgcccaacttcctggcgaaaagaaaaacggtttgttcgggaatctcattgcgctgagcttgggactcacgccaaacttcaagtctaacttcgacctcgcagaggatgctaaacttcagctgtccaaggatacttatgatgacgatcttgacaacctgttggcacaaatcggtgaccagtacgctgatttgttcctcgctgccaagaacctcagcgatgccatactcctttcagacatcctccgcgtgaacactgagattaccaaagcacctctgtctgcttccatgataaagcgttatgatgagcaccatcaagacctcactctgttgaaggcgttggttagacagcaactcccagagaagtacaaagaaatcttctttgaccaatctaagaatggctacgccggatatattgatggcggagcgtcccaggaggagttctacaagtttatcaaacctattcttgagaagatggatggtacggaggaactccttgttaaactgaatagagaggatctcttgcgcaagcaacggactttcgacaacggcagcataccgcaccagatccatctcggagagcttcacgccatccttcgccggcaggaagatttctacccctttctgaaggacaaccgtgagaagatcgaaaaaatccttactttcagaatcccttactatgtcggtccactggctagaggcaactctagatttgcttggatgacacgcaagagtgaggaaactatcaccccttggaacttcgaggaagtggttgacaagggcgcatcggctcaaagtttcattgagagaatgactaattttgataagaaccttccgaacgagaaagtcctgcccaagcattcactcctttacgagtatttcacagtgtataacgaacttacgaaggtgaaatacgttactgagggtatgcggaagccggcattcctgtcgggggaacaaaagaaagctatagtggatctgttgtttaaaactaacaggaaggttaccgtcaagcagcttaaggaggattacttcaagaaaatagaatgttttgactcggtggagatcagtggcgttgaagatagattcaacgcttcactgggaacctaccacgacctccttaagatcattaaggacaaagatttcttggataacgaggaaaatgaggacattctcgaagatatagtccttacactgacgttgtttgaggaccgtgaaatgatcgaggaaagattgaagacctatgctcatctcttcgacgataaggttatgaagcagctcaagcgtagaaggtacacaggttgggggcgtctttctagaaagctgattaatggcataagggataaacaatctggaaagacgattctggatttcctcaagtccgacggcttcgccaaccgcaattttatgcagcttatacacgacgattccctgactttcaaagaggacatccagaaggcccaagttagcggccaaggagattcacttcacgagcatatcgccaacctggcgggtagcccggcgatcaagaaagggattcttcagaccgtcaaggtcgtggatgagctggtgaaagttatgggccggcataagcccgaaaacatagtgatcgagatggcccgtgaaaatcagactacccaaaaaggacagaagaactcccgcgagcggatgaaaaggatagaggaaggcatcaaggaacttggaagccagatcctgaaggagcacccagttgaaaacacacagttgcaaaatgagaagctctatctttactatctccaaaatggtagagacatgtatgtggatcaggagttggacattaacaggctctcagactacgatgtcgacgctatcgtgccgcaatcgttccttaaggacgatagtatagataataaggtgctgactcggtcggataaaaaccgtggcaagtcggacaatgttcccagtgaggaagttgtgaagaagatgaagaactactggcgccaactgttgaatgcaaaattgatcacccagaggaagtttgacaacctcacaaaagcagagcgcggtgggctcagtgaacttgataaagctggattcattaagaggcaacttgttgagacacgccagattacgaagcacgtcgcgcagatactggattctaggatgaacaccaagtacgacgagaatgataaattgatcagagaagtgaaggttatcacattgaagtctaaactcgtgtccgattttcgcaaagacttccaattttataaggttcgggagatcaacaattatcaccatgcacatgatgcttacctcaacgccgtggttggtacggcgttgattaagaaatacccgaagctggagtctgagttcgtgtacggggattataaggtctacgacgtgaggaaaatgatcgctaagagtgagcaggaaattggtaaagccaccgcgaagtatttcttttactctaacatcatgaacttcttcaagacagagataacgttggcaaatggtgaaatacgtaagagacctctcatcgagactaacggtgaaaccggggaaatcgtttgggataaagggcgggactttgctactgttcgtaaggtcctctccatgccgcaagtgaatattgttaagaaaacagaggtccagacgggcggattctctaaggaatccatccttcccaaaagaaacagcgacaagctgattgcgaggaagaaagattgggaccctaagaaatatggtgggttcgattctccaaccgttgcctactccgtcttggtcgtggcgaaggttgagaagggtaaatctaagaaactcaaatccgtcaaggaactccttgggattactatcatggagaggtcttccttcgaaaagaatcctatcgatttccttgaggctaaaggctataaggaagtgaagaaggatctcatcatcaagctcccaaagtacagcctgtttgagttggaaaacggaaggaagcgcatgttggcatcagctggagagctccagaaagggaacgagctggccttgccttctaagtatgtgaacttcctctatcttgcgtcgcactacgagaagctgaaaggcagtccagaggacaacgaacagaaacaactttttgttgagcaacacaagcattatctggatgagattatagaacagatcagcgagttctcaaaaagagtcattcttgccgatgctaacctcgacaaggtgctctccgcatacaacaaacacagagacaagccgatcagggagcaggctgaaaatatcattcatctcttcactcttaccaacctgggtgcccccgcggcattcaagtattttgatacaacgattgaccggaaacgttacacaagcacgaaggaggtccttgatgcgaccctgattcatcaaagcataacagggctctatgagacgagaatcgatttgtcacagctcggcggagactacccgtatgacgtgcccgattacgctgccgcggcagctgagttcaagcgcgaggaacaggcccggaaggcgaaagtgaacaatgagaagaaaacagaaatcgttaaacctgagagctgctcaaacgagggagacgttaaggatcttaagaggaaagactctgaggatggcaacgaaggagaggaagaggaagctagctcaaaacctaagaaaccaaaggtggcactctcacatctccaagacattgacgacaccgaagcagaccaagaagaagaacccagcggcggcgggtcaggcggaggcgggagcggaggcgggggcagccccgggatgtatccgactggtcaacagatttcgtttcagaccactccgttgaatgttcaagatccaacaaggatgatgaatttggatcaatcttcaccagttgcaagaaatgaaactcagaatggaggaggcattgctcacgctgagtttgctatgttcaattccaagaggcttgaatctgatcttgaagctatgggtaacaaaatcaaacagcatgaggataatctcaagtttctcaagtctcagaaaaacaaaatggatgaagctatcgtcgacttgcaagttcatatgagtaagcttaactcgtctcctactcctagaagtgaaaactctgataacagtcttcagggtgaagatatcaatgcacagatccttcgccacgaaaactcagctgctggagttttaagtctggttgagactcttcatggtgctcaagcttctcagttgatgttgacaaaaggtgttgttggtgttgtagcgaaacttgggaaggtcaatgatgaaaatctcagccagattttgtcgaattatttggggactcgctcaatgttggcagttgtatgcaggaattatgaaagtgttacggctttagaggcttatgataaccatggcaacattgatataaatgctggccttcattgccttggctcttcgattggaagagagattggagacagttttgatgccatctgccttgaaaacctgaggccgtatgttggtcagcacatagctgatgatctgcaaagaaggcttgatcttctgaaaccaaaattacctaatggtgagtgtcctcccgggtttctcggatttgcagtgaatatgatacagatcgatccagcttacttgctctgtgtcacatcatatggatatggtcttcgtgagaccttgttctacaatctattctctcgccttcaagtttacaaaacaagggccgatatgattagtgccctcccatgcataagtgatggtgcggtatctttggatggaggaatcatcaggaaaacggggatcttcaatcttggaaaccgtgatgaggtgaacgtgagatttgcaaagccaactgcttctcgcacgatggacaactatagtgaggcggagaagaaaatgaaagagctgaaatggaaaaaggagaaaacgctggaggacattaagcgggagcaagtgctccgtgagcatgccgtcttcaactttggcaagaagaaagaagaatttgttcgatgcttggctcagagttcatgcactaatcagccaatgaacacacccagatgacccgggggcgcgccatgataactagagtcctgctttaatgagatatgcgagacgcctatgatcgcatgatatttgctttcaattctgttgtgcacgttgtaaaaaacctgagcatgtgtagctcagatccttaccgccggtttcggttcattctaatgaatatatcacccgttactatcgtatttttatgaataatattctccgttcaatttactgattgtaccctactacttatatgtacaatattaaaatgaaaacaatatattgtgctgaataggtttatagcgacatctatgatagagcgccacaataacaaacaattgcgttttattattacaaatccaattttaaaaaaagcggcagaaccggtcaaacctaaaagactgattacataaatcttattcaaatttcaaaagtgccccaggggctagtatctacgacacaccgagcggcgaactaataacgttcactgaagggaactccggttccccgccggcgcgcatgggtgagattccttgaagttgagtattggccgtccgctctaccgaaagttacgggcaccattcaacccggtccagcacggcggccgggtaaccgacttgctgccccgagaattatgcagcatttttttggtgtatgtgggccccaaatgaagtgcaggtcaaaccttgacagtgacgacaaatcgttgggcgggtccagggcgaattttgcgacaacatgtcgaggctcagcaggaccggcatgcaagctagcttactagtgatattctatagtgtcacctaaatctgcggccgcttcctaacacctggagaaccttttatgtacttcacaaccctcaatgctgcttccaggtgtgactgtttgggttgctgcatgaattgactcagcacctgcactgcaaagctgatatctggccttgtgattgtcaagtagagaagctttcccaccagtctctgataggatcccacatcctctaactctgcatcatcagtctttcctaagtgcttgtcatattctacagtagtcagcctttggttctgttccattggggttgacactggtctgcagcctcccagaccaacacctgatatcagttccagtgcatacttcctctggttcagtaggattcccttttctgatctcagcacctcaatgcctaagaagtattttagttctcccaaatctttcatcttgaaatgctgatgcagggttgcctttgcttctgaaatcaaaacattgctgctgcctgttattaacagatcatccacataaatcaggattatgacaaggtcagtcccctctcttttggtaaacaaggagtgatcataagcactttgcataaaaccagcctgcataaggacagtggtaagcttgatgttccactgccttgatgcttgctttaaaccatagagggattcaacagcctgcacactttggtctccccttggctgtgaaaaccctgaggcagagacatataaacttcttccatgaggtcaccttgtagaaaagcattgttgacatccatctggaaaaggaaccagcccttggaagcagcaacagatatgacagcttttacagtgaccattttggccactggagaaaaagtttcatggtagtcaaggccttcttgctgagtgtatcccttggccactagccttgccttaaacctgtcaacttcaccattagctttgtatttaattttgtacacccatttggaccctataggctgtttaccagggggtaaagggacaatctcccaggtgttattatcctcaagagcctgtatctcaagggacatggcctccatccatttctcatcttgagctgcttctttgaaggatttaggttcagtataagtggagaaagcactcaaataagcttgatagtgaacaggcaagtgatcataggaaacatagttggctatagggtatggaacatccctagagcctttgttcagtgtcacaaagtccttgagccagatgggaggacctgcattgcgtttaggtctagtgtgcaggtttgctggaactagagagggatcagctacagcagtatggtgctcaaattcagcatttgctaggtcaggctcagctgactcaactgactctgcaggagcatgcaggtggcctgaaggtgcagcatcagctgaagtgatatgattttgggtagaatgagtccccaaagtgatatcctcattggcctctacaatgtcaggaataagaactggagtatcatcatcatcagtatgaaagctggaaggaaaaatatcattatacactagctgcaaagctgtatcttcagagctaagtgaacctgctcgagtgaacatatcaggttcatgggagatggactctttgaaagggaactgaaactctctgaaaactacatccctgctcactatgatcaccttattatccaagtcatacaacctgtaacccttttgagtctcagaataaccaatgaagatggttcgcttggctctaggtgcaagtttgtcacctttgggcagtgttgctgcaaaagcaagacacccaaacactctcaagtgatcaagcttggcatgtttctgatagagtagttcatatggacatttgccttgtaagattggagtagggagtctattgatcaggtatacaacagtcttgacacagtctccccaaaacctggtaggtacaccactctgaaacttaagtgcccttgccatctcaaggatgtgtctgtgctttctctccacaacaccattctgttgtggtgtgtagggacagctactttgatgaacaatcccaagagaggccagcaactcattacaacttgtttaagctttcgttgaacaacggaaactcgacttgccttccgcacaatacatcatttcttcttagctttttttcttcttcttcgttcatacagtttttttttgtttatcagcttacattttcttgaaccgtagctttcgttttcttctttttaactttccattcggagtttttgtatcttgtttcatagtttgtcccaggattagaatgattaggcatcgaaccttcaagaatttgattgaataaaacatcttcattcttaagatatgaagataatcttcaaaaggcccctgggaatctgaaagaagagaagcaggcccatttatatgggaaagaacaatagtatttcttatataggcccatttaagttgaaaacaatcttcaaaagtcccacatcgcttagataagaaaacgaagctgagtttatatacagctagagtcgaagtagtgattgnnnnnnnnnnnnnnnnnnnngttttagagctagaaatagcaagttaaaataaggctagtccgttatcaacttgaaaaagtggcaccgagtcggtgctttttttgtttaaacaaaccaccccgtgtc

SEQ ID NO: 463 - DNA, 54 bp, Artificial Sequence
  Synthetic Construct
cccagcggcggcgggtcaggcggaggcgggagcggaggcgggggcagccccggg

SEQ ID NO: 464 - DNA, 580 bp, Artificial Sequence; identical to SEQ ID NO: 461
  Synthetic Construct
  misc_feature 455, 456, 457, 458, 459, 460, 461, 462, 463, 464, 465, 466,467, 468, 469, 470, 471, 472, 473, 474: n = A,T,C or G

SEQ ID NO: 465-502 - skipped (38 entries)

SEQ ID NO: 503 - protein, 1194 aa, A. thaliana
MDRGGYRGGRGDGRGRGGGGDRGRGYSGRGDGRGRGGDGDRGYSGRGDGHGRGGGGDRGRGYSGRGDGRGRGGGGDRGRGYSGRGDGHGRGGGGDRGRGYSGRGRGFVQDRDGGWVNPGQSSGGHVRGRGTQLQQPPPQEVPPSSSQAQVSQGVAPGDVGQGGVGDVGRDGVGDVGRDGVGDVGQGGVGDVGQVGVGDVGQGGVGDVGQGGVGDVGRDGVGDVGRDGVGDVGRGGVGDRGQSQSGLSSGHFGRGTQLQQPQPQAVSQSSSQGQVSQSFATGGVGLGAWARKPQLFSDSTVLPSSSSSNVVASHTASGSQVMTPKPSSSDKKEPVKRPDKGGNIKVKGVINLSVNHFRVSFSTESVIRHYDVDIKGENSSKKISRFELAMVKEKLFKDNNDFPNAMTAYDGQKNIFSAVELPTGSFKVDFSETEEIMRGRSYTFIIKQVKELKLLDLQAYIDGRSTFIPRDVLQGMDVVMKEHPSKRMITVGKRFFSTRLEIDFGYGVGAAKGFHHTLKPTVQGLSLCLNSSLLAFRKAISVIEYLKLYFGWRNIRQFKNCRPDDVVQELIGLKVTVDHRKTKQKFIIMGLSKDDTKDIKFDFIDHAGNQPPRKISIVEYFKEKYGRDIDHKDIPCLNLGKKGRENFVPMEFCNLVEGQIFPKEKLYRDSAAWLKELSLVTPQQRLENINKMIKSSDGPRGGDIIGNFGLRVDPNMTTVEGRVLEAPTLKLTDRRGNPIHEKLMSESNQWNLTTKGVTKGSIIKHWAVLDFTASESLKKKMPGYFVNKLIERCKGLGMQMEAPIVCKTSSMETLYDGNALEELLRSVIDEASHNHGGACPTLVLCAMTGKHDGYKTLKWIAETKLGLVTQCFLTISAIKGETVSDQYLANLALKINAKVGGTNVELVDNIFSFFKKEDKVMFIGADVNHPAAHDNMSPSIVAVVGTLNWPEANRYAARVKAQSHRKEEIQGFGETCWELIEAHSQAPEKRPNKIVIFRDGVSDGQFDMVLNVELQNVKDVFAKVGYNPQITVIVAQKRHQTRFFPATTSKDGRAKGNVPSGTVVDTTIIHPFEYDFYLCSQHGAIGTSKPTHYYVLSDEIGFNSNQIQKLIFDLCFTFTRCTKPVALVPPVSYADKAASRGRVYYEASLMKKNSKQSRGASSSSASVASSSSSVTMEDKEIFKVHAGIENFMFFV

SEQ ID NO: 504 - protein, 651 aa, Arabidopsis thaliana
MSTLLPFPDLNLMPDSQSSTAGTTAGDTVVTGKLEVKSEPIEEWQTPPSSTSDQSANTDLIAEFIRISELFRSAFKPLQVKGLDGVSVYGLDSGAIVAVPEKENRELIEPPPGFKDNRVSTVVVSPKFERPRELARIAILGHEQRKELRQVMKRTRMTYESLRIHLMAESMKNHVLGQGRRRRSDMAAAYIMRDRGLWLNYDKHIVGPVTGVEVGDIFFYRMELCVLGLHGQTQAGIDCLTAERSATGEPIATSIVVSGGYEDDEDTGDVLVYTGHGGQDHQHKQCDNQRLVGGNLGMERSMHYGIEVRVIRGIKYENSISSKVYVYDGLYKIVDWWFAVGKSGFGVFKFRLVRIEGQPMMGSAVMRFAQTLRNKPSMVRPTGYVSFDLSNKKENVPVFLYNDVDGDQEPRHYEYIAKAVFPPGIFGQGGISRTGCECKLSCTDDCLCARKNGGEFAYDDNGHLLKGKHVVFECGEFCTCGPSCKSRVTQKGLRNRLEVFRSKETGWGVRTLDLIEAGAFICEYAGVVVTRLQAEILSMNGDVMVYPGRFTDQWRNWGDLSQVYPDFVRPNYPSLPPLDFSMDVSRMRNVACYISHSKEPNVMVQFVLHDHNHLMFPRVMLFALENISPLAELSLDYGLADEVNGKLAICN

SEQ ID NO: 505 - protein, 364 aa, Ricinus communis
MHQKLEGGNLALERSMHYGIEVRVIRGFKYAGSFTNKIYVYDGLYKIHDCWFDVGKSGFGVYKYKLMRIVGQPEMGSSVLRFAQSLRTAPLSVRPRGYLSLDISNKKENMPIMLFNDIDNDHDPLCYEYLARTVFPPFAFNQGSSGTGCECIGGCVDGCLCSMKNGGEFAYDQNGFLLRGKPLVFECGAFCKCPPSCRNRVSQKGLKNRLEVFRSRETGWGVRSLDLIHAGEFICEYAGVILTKDQAQVFTMNGDSLIYPNRFSPKWAEWGDLSQIYADYVRPTYPSVPPLDVAMDVSRMRNVACYLSHSSTPNAMVQYVLFDHNNLMFPHLMLFALENIPPLREISLDYGVADEWTGKLSICN

SEQ ID NO: 506 - protein, 709 aa, Glycine max
MNFLFSRENLPPPPGIPIPATIAAANTTPNPILIPKLEPFDELLNTHTPQQQQQSQDPSFSNGSLDLDLDLDLKLVCDETPGAFSGDPSLLSDFNRLSQLFKTAFTNNNAVLDPIAQGLQQLQNDAVSDPLDGTTVVPPQSFQNSDPGMQQQQQYPNGAVSDPDSRAIVPVPEEGRSSSVAVTTPRQRRFKELVRLTDVGGPEQRHFRDVVRRTRMVYDSLRVLATVEDEGRVDARRGRSDLRASAVMRNCGLWLNRDKRIVGAIPGVCIGDVFLYRMELCVVGLHGQPQAGIDYLPASMSSNGEPIATSVIVSGGYEDDVDEGDVIIYSGHGGQDKHSRQVFHQKLEGGNLAMERSMHYGIEVRVIRGVRYEGAASATGRLYVYDGLYRIHECWFDVGKSGFGVYKYKLCRIDGQAKMGTVVMKEALMLRKDPLSFKPTCCLSLDVSNRKENVAVRLFNDIDPNYDPLQYEYLVKTNFPQFVFHQSGRGTGCECADGCVEGCFCAMKNGGDFPYNQSGILLRGKPLVFECGPFCRCPPHCRNRVTQKGLKNRLEVFRSRETGWGVRSMDLIQAGAFICEYTGVVLTREQARLLTMNGDSLIYPNRFTDRWAEWGDLSMIDSNFVRPSYPSIPPLDFAMDVSRMRNVACYMSHSSTPNVLVQFVLYDHNNLMFPRLMLFAMESIPPMRELSLDYGVADEWTGKLSICNE

SEQ ID NO: 507 - protein, 682 aa, Zea mays
MDVVESSPSSSPISSPAGSSESIDLNFLPFLKREPKSEPASPELGPLPLPAPPTQTPQQQHAAAPAPEATAPLSPATPDLSSAPVMAPLQSLPPNLDEDALLREYYRLAGLYLSSARSGAIIPALAPEAAAPAVVQSGSGSVVKKRRPRSSDLVRVSSLGVQDQIYFRDLVRRARITFECLRGLLLRDDERAESLGLAAVAGFGVARDRRRVRADLRAAALMGDHDLWLNRDRRIVGPMPGISVGDAFFFRMELCVLGLHGQVQAGIDYVSAGRSASGEPIATSIIVSGGYEDDDDHGDVLVYTGHGGRDPNLHKHCVDQKLEGGNLALERSMAYGIEIRVIRAVKSRRSPVGKVYFYDGLYKVVDYWLDRGKSGFGVYKYRLLRIEGQEPMGSVNYRVAEQLKVDVFAIRPTGYLSFDISMGRDTLSVALFNDVDDDQDPLLFEYLARPIFPTSAVQGKFAEGGGGGCDCAEICSIGCNCAGRNGGEFAYDRTGTLLRGKPLVYECGPYCRCPPSCPNRVSQKGLQHRLEVFRSRETGWGVRSLDLIKAGTFICEFSGIILTHQQSEVVAANGDCLVRPSRFPPRWLDWGDISDVYPDYVAPDHPSIPELKFAIDVSRARNVACYFSHSCSPNVFVQFVLFDHYNVSYPHLMIFAMENIPPLRELSIDYGMVDEWIGQLTM

SEQ ID NO: 508 - protein, 570 aa, Medicago truncatula
MNFQDPNPSISRTIVPIPNELQNYDNNTLTGKDSKSKQKLRGQNKELVHTVMDADHRPYREMVRRTRILFDSIRVSGLLEEENNRKNKKNLKASSLVNQTEEVNNSRVRNDLIAATLMKDHGMYLYHDVKIIGTVPGVSIGDIFLYRSEMCVIGLHGQPQAGIDYLHASMSSNGQPIATSVVVSDGYNDDDQGDSIIYSGHGDMKQDQKLERGNLAMVTSMQYEIDVRVIRGFRYEGATSTTSSKVFVYDGLYKIIEFWFEKGISGFGVYKFMLSRVQGQPKMGSMILKEASMLMRGHLCDNHMCVLSDDISNGKENIGVRLYNDIDSDLYPMQFEYLPKAAFPMFLLPQSMTTRKKMRVIECSECVDGCVSSIMNGNTTPYSKSGILLKGRSLIYECGPFCSCPSHCRNRVTQKGIKYRLEVFRSNETSWGVRSLDPILAGTFICEFTGLVLTREQAEILTMDGEHNSLIIYPNRFLNRSTQEWGDLSMIDANHVHPAYPTLDFALDVSMMRNVASYISHSPTPNVFVQLVLFDHGNWMFPHLMVFAMENIPPMRELSLDHGVEARVID

SEQ ID NO: 509 - protein, 533 aa, Physcomitrella patens
MNFEASLNDEAQPNDLDSELYRQRRKRYADLLHFYQQLQEKGESNERIRPDLEATKKMQEEKMNFDWKGVGHVPGSIVGDFFFYRTELFVLGLHRAMQAGIAYTEVGQEKIGCSIVASGGYEDDEDHGETMIYTGHGGNNKADRRQVKDQKPEGGNLALLNSLKYKQPVRVIRGHSDIPTSQSPSKKIYSYDGLYQVVDQSLELGASGFKVFKFKLERLPNQRELGSRLVSFVGKLNKAPSIRTGVVIEDLSGGQEPIPVSVVNTVDDTRPPSSFEYTTKLRYPKGVSLRSSTGCSCKGDSCHSVGHRCSCVLKNSGKMLPYNQYGHLIRAVPAVYECGSRCKCSLECHNRVCQKGLRYRLEIFKTEKKGWAVRSWDFIPSGGFVCEYTGVIMDTKTADELDDDDYLFNLDFKQGNEARWGVQRSDVFDSDDSDMPPLKLSSPKYVIDASKFGGVARFVNHSCTPNLFVQCVLYDHGDLDLPHVMLFAGSDISPFQELTYDYGYALNSVYDSHGNLKKKDCHCGTRSCRKRLY

SEQ ID NO: 510 - protein, 710 aa, Sorghum bicolor
MRREGLGNFGVEEEEAREDGQGSLFMEMDVEESSPSSSLMSSPAGSSDSIDLNFLPFLKREPKSEPGSPELGPLPLPTQTPPPQHAAAPAPAPAPEASVPLPPATPDLSSAPVMAPLQSLPPNQDVDAVLQEYYRLASLYVSSTGSGAIVPAPAPEATAPAVVQSASGSVVKKRRPRSSDLVRVSSLGVQDQIYFRDLVRRARITFECLRGLLLRDDERAESLGLPGVAGFGVARERRRVRADLRAAAIMADHDLWLNRDRRIVGPLPGISVGDAFFFRMELCVLGLHGQVQAGIDYVSAGRSASGEPIATSIIVSGGYEDDDDHGDVLVYTGHGGRDPNLHKHCVDQKLEGGNLALERSMAYGIEIRVIRAVKSRRSPVGKVYFYDGLYKVVDYWLDRGKSGFGVYKYRMLRIEGQEPMGTVNYQVAEQLKVDVLAIRPTGYLSFDISMGRETLPVALFNDVDDDQDPLLFEYLARPIFPTSAVQGKFAEGGGGGCDCAGICSIGCNCAGRNGGEFAYDKTGTLLRGKPLVYECGPYCRCPPSCPNRVSQKGLQHKLEVFRSRETGWGVRSLDLIKAGTFICEFSGIVLTHQQSEIVAANGDCLVRPSRFPPRWLDWGDISDVNPDYVAPNHPAIPELNFAIDVSRARNVACYFSHSCSPNVFVQFVLFDHYNASYPHLMIFAMENIPPLRELSIDYGMVDEWVGQLTM

SEQ ID NO: 511 - protein, 684 aa, Oryza sativa
MEMDTSPSSSAPSSPAASSDSIDLNFLPFLKREPKSEPASPERGPLPLPAAAPPPPPPPPPPPPPPQVQAATVATPVPATPDLSAAAVMTPLQSLPPNPEEETLLAEYYRLATLYLSSAGAAGVIVPAAAPEASAGAVAQPGSGSGAKKRRPRSSELVRVSSLSVQDQIYFRDLVRRARITFESLRGILLRDDERAEVLGLTGVPGFGAVDRRRVRADLRAAALMGDRDLWLNRDRRIVGPIPGISVGDAFFFRMELCVLGLHGQVQAGIDFVTAGQSSSGEPIATSIIVSGGYEDDDDRGDVLVYTGHGGRDPNLHKHCVDQKLEGGNLALERSMAYGIEIRVIRAVKSKRSPVGKVYFYDGLYKVVDYWLDRGKSGFGVYKYKMLRIEGQESMGSVNFRLAEQLKVNALTFRPTGYLSFDISMGREIMPVALYNDVDDDRDPLLFEYLARPIFPSSAVQGKFAEGGGGCECTENCSIGCYCAQRNGGEFAYDKLGALLRGKPLVYECGPYCRCPPSCPNRVSQKGLRNRLEVFRSRETGWGVRSLDLIKAGTFICEFSGIVLTHQQSEIMAANGDCLVRPSRFPPRWLDWGDVSDVYPEYVAPNNPAVPDLKFSIDVSRARNVACYFSHSCSPNVFVQFVLFDHYNAAYPHLMIFAMENIPPLRELSIDYGMIDEWVGKLTM

SEQ ID NO: 512 - protein, 678 aa, Brachypodium distachyon
MEVEESSPSSPLSSPSSSPSSDSIDLNFLPFLKREPKSEPASPEHDPLPPPPPPPPPPQAAAAVAVAYVDPTPATPDLSSPAVMTPLQSLPPNPDEDALFAEYCRLASLYLLSAGAGAIVQAPTPEAAAPAVVQPGSGSAVKKRRPRSSELVRVSSLGMRDQIYFRDVVRRARITFESLRGLLLKDDERAEALGLPGVVGLGSTDRRRVRADLRAAALMADRDLWLNRDRRIVGPIPGISVGDAFFFRMELCVLGIHGQVQAGIDYLTAGRSASGEPIATSIIVSGGYEDDDDRGDILVYTGHGGRDPNLHKHCVDQKLEGGNLALERSMAYGIEIRVIRAVKSKRSPVGKVYFYDGLYKVVDFWLDRGKAGFGVYKYKMIRIDGQDAMGSVNYRVAERLKVDALSMRPTGYLSFDISMGRESMPVALYNDVDDDKDPLLYEYLARPIFPSSAVQGKFAEGGGGCECIENCSIGCYCAQRNGGEFAYDKAGVLLRGKPLVYECGPYCRCPPSCPNRVSQKGLKNRLEVFRSRETGWGVRSLDLIKAGAFICEFSGIVLTHQQSEIVAVNGDCLVHPNRFPPRWLDWGDISDVYPGYVPPNHPAIADLNFSIDVSRARNVACYFSHSCSPNVFIQFVLFDHYNMSYPHLMIFALENIPPLRELSIDYGMIDEWVGKLTM

SEQ ID NO: 513 - protein, 519 aa, Populus trichocarpa
RSSELVRVTDLGIEDQRYFRDLVRRTRMVYDSLRILSILEEEKRRGERLGRRARGDLRAASAMRDCGLWLNRDKRIVGSIPGVQIGDVFFFRMELCVMGLHGQAQAGIDYLPASQSSNREPIATSIIVSGGYEDDEDAGDVIIYTGHGGQDKLNRQCEHQKLEGGNLALERSMRHGIEVRVIRGIKHEGSVSSKVYVYDGLYKILDYWFDVGKSGFGVYKYRLLRIDGQPEMGSSILKFAESLRTKPLTVRPRGYLSLDISNKKENMPVFLFNDIDNDHDPLCYQYLERTVFPVFVFTNGSNGTGCDCVSGCSDGCFCAKKNGGELAYDENGFLLKGKPVVFECGVSCRCPPTCRNRVTQRGLRNRLEVFRSRETGWGVRSLDVIHAGAFICEYAGVVLTREQAQIFTMNGGGLVYPNRFSAKWAEWGDLSQIYPNYTRPSYPELPPLDFAMDVSKMRNVACYMSHSSAPNVLVQFVLYDHNNLMFPHIMLFAMENIPPLRELSLDYGVADGWTGKLAI

SEQ ID NO: 514 - protein, 672 aa, Vitis vinifera
MGSLIPFQDLNLLPDPATSPSTAATAITPALIFPKIEPKLEPFDAPTLPLQSFPQNPSPNFFVNSGQLPFVGPGSNPNDTVFSQTPEGSPEENNVYSEYYRISELFRTAFSKRMENLGNIEVLDPDSRAIVPVPEETRISNVVVSRRRDQRSSELVRVTDLTIDHVRYFRDLVRRTRMLYDALRIFSMMEEEKRREVGLITRRSRGDLRAAKLMKDRGLWLNRDKRIVGSIPGINIGDLFLFRMELCVVGLHGQAQAGIDYLPGSRSSNGEPIATSIIVSGGYEDDQDEGDVLIYTGHGGQDKFSRQCDHQKLEGGNLALERSMHYGIEVRVIRGIKYEGSVTGKVYVYDGLYKIHDSWFDVGKSGFGVYKYKLLRNEGQAEMGSAILRFAENLRVSPLTVRPVGYLCDDLSTKKENIPVFLFNDIDGDNEPMYYEYLPRTVFPLHAYNLGGNGSGCDCVAGCTDDCVCAQRNGGEFAYDQNGFLLRGKPVIFECGSFCRCPPTCRNRLTQKGLRNRFEVFRSRETGWGVRSLDLIQAGAFICEYAGVVLTREQAALFSMNGDTLIYPNRFTDRWAEWGDFSKVYSDYVRPMHPSIPPLDFAMDVSRMRNLACYMSHSSCPNVLVQFVLYDHHNLLFPRLMLFAMENIPPLRELSLDYGVADEWTGKLPICN

SEQ ID NO: 515 - protein, 695 aa, Cucumis sativus
MDSPIPFQDLNLLPDPSSTAVMTAATSPKTATGINSSFNKFVDTGKLLTPKLEPKLEPFDDLFETRESQQPQSVQQPFLSTPSSNFFSNTDFSQTPFSDQNHTPLSQSSSISSDKDNVYSEFYRISQLFRSAFGKGLQSYGDADVEVVDPDAQAIVPVPEENQISTVVVSKRRYDKRSSELVRVTDLGVEDQRYFRDVVRRTRMIFDSLRVLSTAEEEKSPGLMRRLRGDLRASSLMRERGLWLNRDKRIVGSIPGVHIGDLFFFRMELCVVGLHGQAQAGIDYVPASQSSNGEPIATSIIVSGGYEDDEDAGDMIIYTGHGGQDKFSKQCMHQKLEGGNLALERSMHYGIEVRVIRGMKYAGSVASKIYVYDGLYRILDCWFDVGKSGFGVYKYKLLRIDGQAEMGSSILKFAENLRTKPLSLRPSGYLSLDISMKKEAVPVLLFNDIDNDQEPLYYEYLVRTVFPPFAFHQSGSGTGCSCVTSCVHDCFCAMKNGGEFGYDQNGFLVRGKPIIFECGPFCQCPPQCRNRVSQKGLKHRLEVFRSRETGWGVRSLDLIHAGAFICEYAGVVLTREQAQVFSMNGDTLIYPNRFSDRWAEWGDLSQIYSNYVRPSYPSVPPLDFAMDVSRMRNVACYISHSTSPNVLVQFVLYDHNNLMFPHLMLFAMENIPPLRELSIDYGVADDWSGKLAICN

SEQ ID NO: 516 - protein, 654 aa, Arabidopsis lyrata
MSTVVPFPDLNLMPASQSSTAGTTAGDTVVTGKLEVKAEPVEECQTPPSSFSDQSASTDLIAEFIRISKLFRSAFKPHQIEGLDGVSVYGLDSGAIVTVPEEENRELIKPPPGFGDNRVSTVVVSPPPTKFERPRELARIAILGHDQRKELRQVMKRTRMTYESLRIHLMAESMKNPVLGQGRRRRSDMAAAYIMRDRGLWLNYDKHIVGPISGVEIGDIFFYRMELCVVGLHGQTQAGIDCLTAERSATGEPIATSIVVSGGYEDDEDTGDVLVYTGHGGQDKQHKQCDNQRLVGGNLGMERSMHYGIEVRVIRGIKYENSISSKVYVYDGLYKIVDCWFAVGKSGFGVFKFRLVRMDGQPMMGSAVMRFAQTLRSKPLMVRPTGYVSFDLSNKKENVPVFLYNDVDGDQEPRHYEYIAKSVFPPGIFGQGGISRTGCDCKLSCTDDCLCARKNGGEFAYDDNGHLLRGKDVVFECGELCTCGPNCKSRVTQKGLRNRLEVFRSKETGWGVRTLDLIEAGAFICEYAGVVVTRHQAEILSMNGDVMVYPGRFTDKWRNWGDLSQVYPDSVRPDYPSLPPLDFAMDVSRMRNVACYISHSKDPNVMVQFVLYDHNHLMFPRVMLFALENISPLAELSLDYGLADEVNGKLAICN

SEQ ID NO: 517 - protein, 650 aa, Arabidopsis thaliana
MGSSHIPLDPSLNPSPSLIPKLEPVTESTQNLAFQLPNTNPQALISSAVSDFNEATDFSSDYNTVAESARSAFAQRLQRHDDVAVLDSLTGAIVPVEENPEPEPNPYSTSDSSPSVATQRPRPQPRSSELVRITDVGPESERQFREHVRKTRMIYDSLRMFLMMEEAKRNGVGGRRARADGKAGKAGSMMRDCMLWMNRDKRIVGSIPGVQVGDIFFFRFELCVMGLHGHPQSGIDFLTGSLSSNGEPIATSVIVSGGYEDDDDQGDVIMYTGQGGQDRLGRQAEHQRLEGGNLAMERSMYYGIEVRVIRGLKYENEVSSRVYVYDGLFRIVDSWFDVGKSGFGVFKYRLERIEGQAEMGSSVLKFARTLKTNPLSVRPRGYINFDISNGKENVPVYLFNDIDSDQEPLYYEYLAQTSFPPGLFVQQSGNASGCDCVNGCGSGCLCEAKNSGEIAYDYNGTLIRQKPLIHECGSACQCPPSCRNRVTQKGLRNRLEVFRSLETGWGVRSLDVLHAGAFICEYAGVALTREQANILTMNGDTLVYPARFSSARWEDWGDLSQVLADFERPSYPDIPPVDFAMDVSKMRNVACYISHSTDPNVIVQFVLHDHNSLMFPRVMLFAAENIPPMTELSLDYGVVDDWNAKLAICN

SEQ ID NO: 518 - protein, 364 aa, Ricinus communis; identical to SEQ ID NO: 505

SEQ ID NO: 519 - protein, 709 aa, Glycine max; identical to SEQ ID NO: 506

SEQ ID NO: 520 - protein, 682 aa, Zea mays; identical to SEQ ID NO: 507

SEQ ID NO: 521 - protein, 570 aa, Medicago truncatula; identical to SEQ ID NO: 508

SEQ ID NO: 522 - protein, 533 aa, Physcomitrella patens; identical to SEQ ID NO: 509

SEQ ID NO: 523 - protein, 710 aa, Sorghum bicolor; identical to SEQ ID NO: 510

SEQ ID NO: 524 - protein, 684 aa, Oryza sativa; identical to SEQ ID NO: 511

SEQ ID NO: 525 - protein, 678 aa, Brachypodium distachyon; identical to SEQ ID NO: 512

SEQ ID NO: 526 - protein, 519 aa, Populus trichocarpa; identical to SEQ ID NO: 513

SEQ ID NO: 527 - protein, 672 aa, Vitis vinifera; identical to SEQ ID NO: 514

SEQ ID NO: 528 - protein, 695 aa, Cucumis sativus; identical to SEQ ID NO: 515

SEQ ID NO: 529 - protein, 654 aa, Arabidopsis lyrata; identical to SEQ ID NO: 516

SEQ ID NO: 530 - protein, 349 aa, Arabidopsis thaliana; identical to SEQ ID NO: 14

SEQ ID NO: 531 - protein, 420 aa, Arabidopsis thaliana; identical to SEQ ID NO: 448

SEQ ID NO: 532 - protein, 163 aa, Solanum lycopersicum
MKDVIGIVALLGKVDDDNLSRKGPMNKSSGLHGVGASIGRPLDDRYLVIFLENLRPYAGEFIVDDPQRRLAIRRKPRYVNEETPHVFLGFAVNMINIDTANLYCVTRTGYGLRETLLYGLFSQLQVYKTSADMMEALPFIIDGAISLDGGIIKSGGIFSLGKR

SEQ ID NO: 533 - protein, 1790 aa, Solanum tuberosum
MSSKRQCDDFSAETPRKKPSRVLRIQVDSDEEVGTNEGRVFYFRVLLPNGITLELQVPGPPSEMPVEDFVILVRREYQNLGRRTESPKPKRQINWTSKDLHFVDAFENRITKMLDFRKFKSNKSHMIRLCDGSAEADKYENMWDLTPDTDLLKELPEEYTFETALADLIDNSLQAVWPKSTDQRRLISLELTKSRITIFDTGLGMDGSAENSIVKWGKMGASLHRLSRDRGIGGKPPYLTPYFGMFGYGGPIASMHLGRRASVSSKTKECKKVFVLHLERDSLLRCSSSQQTWRTDGNVRDPLEDELRYSVDGSFTKVEIFYPKMRSESVQKLQYKLKDIYFPYIQCDEVSKTGKTVMPIEFQVNGTNLAEIEGGEVATTNLLSCNGPEFVMQLSFHVKDSNSLKIGSGTKSSFEGHARLRCVYFPMVQGKESIEVILEKLEADGYGITENFETFSHVSVRRLGRLLPDARWSWLPFMEPKLRKSDRAEVLKRCCFRVKCFIETDAGFNPTPSKTDLAHHHPCTIALRNFGNKPSDKENDVLIEISKDGKKLSLLQLEKLYQDWLLQMHDRYDEEIDCGEDQPTFVIGPSHKKELGVSADVLRIHKAFQRKGITWKAGQKIKILKGACRGFHKNNIFATLEFIILEGWQGDSGGEARIICRPLHVPAESGCRLTFDEGCACFEIRDSKSFPISVIDAGKCLAVDNTEWENQILKHQEKTTPSSIDILDAEQCQELDIKGALPQDVDAGHEPPEEITAVVRPASFSSVTAYKNLDQKYIMKENFEMTLEIKFKADENEKERHIYSGQLNPSSLKGFHGLYIFPLKKKSPNLFQKAGIYLFRFSLIESRTISVKEVRVKALPEAASWELVSDGKSTHSVRVGSCFPEVFSVACCDRFCNRIPFKSQTEIEMKLCSGGRAISSECSYDQCITHDRYTMKFKNVTIESSELDMIRPSYKATLHINSKEDPFFVAIPCAVIPGPLQRILLRPVDFGKKLVPGMVLKELALETFDKYGNHMRKDEHIKLTLEGLHLLDKGDSFYKVDDHGCVNLSGTLKVTAGYGKLVSLSVLSGDKVVFKKEFQTDRRSLRVASKVPKVCAAGSHLEDVVFEVINSAGEVDEDIDSEVEDGHSHTLLIRQDSLREEDNVRYSFHHGRCIVRSIPLPDNEGLFCFVASHSRFHELQTSIEVHVEKAVIRTHELTQPRSPKKEILLHEDSNGKGPETVCHNTFDGRIMIFNDSCASMDLEDRLQTVTKLECVSRQKLGDDICRYGLCIRRCDANVESLNIKQSNIELEMSNLGVVWLYVVRKLFNWHMKSKSNVMCIMNHAYVKPTAWHGHMQKAVVTSSLNHDLEPCSFKPKDYYLRRLHLLYILLYLLAFRLRSVNVSERSEPKSRNIDCWHQVHVVISLFGWFKCSPDISFLFLMSLEFSLNFSLLSVPGAITSLAISQSVKLKEIINCNMKLVMDAAFIGLDSFHDLGYDKDVIMEKIEGKADSAAAVIHKLLRSPKPEQLYLKYAHDILGVVALLGEVRTHKLSSMFSTYLGEDQMLAVVCKSRAAARALENYRMDGNVNCASALDILAAKLGISIKGRYLVICLEDIRPYKQGVSSDPQRELAIPHPTLSNRETPPGFLGYAVNMIFLPAEYLQLRTASGHGLRETLFYRLFGKLQVYKSREQLYMASSCIEEGAVSLDGGMMRGNGVVSASVGSEEPYILFPVICLERQLLLSPEKVKRLKRIEELKLERNQLQDQIQEELRNEAKYKKKLAKKLRDKKQIDDQLEPSPGMYSSDMDISC

SEQ ID NO: 534 - protein, 350 aa, Phaseolus vulgaris
MSQLNHTQSLRDDISERSKIIKQHEDNLKFLNSQSNQLAESIFDLQVSLAKYHSNNVITSDSGNGAFHTEEETMEQIMKKENTAAGVFSWLKGNAQTSNLTLTKDVVGVVATLGKVESDNLSRILSEFLGLERMLAIVCSSYEGINALEKYDTEGLINCNAGLHGIGSSIGKRINGRFAVISLEDLRPFVGGLVADDPQKKLALPKPRLPNGECPPGFLDYAVNMIHLDSKHLSFLTDIGHGLRETLFYGLFSRLQIYKTRNEMLLALPCIYDGALSLDGGMIQRGGMFALGCRKDVEVKFPLISGGSDVPSNYIETEETVRKLNWETSKLSADKHREQQLLDYRKGNLH

SEQ ID NO: 535 - protein, 431 aa, Vitis vinifera
MFQPHNQLSIQTKPLAIQEPSALMHVDPNNSFGAARDEMHNGGLSKAESAVNNSKKLQDELQTLGFKIKQHEDNIKYLKTQKDNLDGSILDLQVTLGKYCSSSIPTMENEALSKSRSENETVEQILKYEKSAAAILCQLKIRHGSQASHLTLAKDVLGIVATLGKVDDENLSRLFSEYLGLETMMAIVCKTYEGVKTLETYDFEGGINKHSGLHGLGSSIGRHLDGRFRIICLEHLRPYAGDFVADDTQRRLDLLKPRLPNGECPPGFLGFAVNMINVDSANILCLTSSGCGLRETLFYNLFSRLQVYRTRAEMLLALPCITDGALSLDGGMIKTAGVFSLGSREDVEVRFPKSSGSNLPLEYFETEKELTEVNWKREKVEEDIQREQSLLNHINYTFRIKKQAFIKYLADSSPYGIQQQIPGERERLTQR

SEQ ID NO: 536 - protein, 1596 aa, Theobroma cacao
MQSQFNAMEDKFHRRASKRPLVLEDEDDADGSNEVYRFKVLLPNGTSVDLSLKNQKPEISFEDFIDLIRVEYDYIVRSQRQSVKRKRIINWNSEKLYLEGDMGGKIMSRIKLRHFKPLKCHILRLHDGSGEVANTYENMWDLTPDTDLLMELPEEYTFETALADLIDNSLQAVWLNGKNERRLISVNVLENTISIFDTGPGMDSSDENSIVKWGKMGASLNRLSKVQAIGCKPPYLMPFFGMFGYGGPIASMHLGSCAIVSSKTKESKKVYTLQIAREALLNNSNPERCWRTDGGIRDASEDEIEKSPHQSFTKVEILKPKQKNLDIFKLQCKLKDTYFPYIQCDELSKVGRTITPVEFQVVNGVDLTEIDGGEAAITNLLSCNGPEFSILLHFSLRRENVATKGSKASQEANARLKCIYFPIRQGKENIERILERLGAEGCGVRENYEDFSRVSIRRLGRLLPDARWALLPFMDLRQRKGDKSHLLKRCCLRVKCFVETDAGFNPTPSKTDLAHHNPFSIALKNFGSRHVEKEKDVDVDIYRGGKQLTFLQLEREYQDWLLLMHDSYDEEIVSGEDQPVLVVGPLNKKALGISSDVIRVHKILKRKGVLWKRRQRIKVLKGACAGFHKNNVYATLEYFLIEGFQGDFGGEARIICRPLGLSNGSILSVKDGNASFDIRSSLSLPVSVIDSGKCLAIDDTDWDCQLEKQCQKAPSRIDLLNAKQCQELEVDGALPADATVHAGLVPPKEIVAVLRPRSFGSSSASNDLEQKDILKINLEMSMEVNFRRTKNHQDVKHIYSGRITPSSHKGFNGLYVFPIGSKFTHLFQVAGLYTFLFSIEHSGCQDCKKTLLVVPSLKVGKWRLLSDGKIPSYNVRVGSCFALIPIACYDIYGNRMPFSSIPNFKIKLVMNEGMLVDVTQMKPSLSSDNLVLNIEDVMIESNGLDSMRPHYAATLVIYSKDESVSISVECQVTPGALRNVRACPEVLGNQLLPGFIIEQLVLEMFDAYGNHVAEGAEVQFHLDGFVIQGHLGSKYKVDDRGCIDLGGLLEVTAGYGKSVSLSVLHDGKVVFKREFQTEKRELRIASVVPERCIAGSILEDLAFEVVDSQGVVDETFHDDEKHGQSHRLIVNSESFETCDSICYAFIHGCCIVTSIPLPEIEGPFCFVAFHSRYMDLYLNVKVSLVRPRKVESDEIEYPSDQKGLFLQKSQSVKDVGCLLSLVKYDKELEDEVCKYGERIAKWEHLLETLDCRKASIERYVSGLQASLEPNLIDNLDSLSTKEEMMIRIKERDHSAASVLCSLAQKLPFQEPWMDVIEGLVGVVALLGTVCTSKLSRILAEYLGEDQMLAVVCKSYTAARALEKYEHNGKVDWKLGLHAEATALGKSISGRFLVVCLEDIRPYPGLIEVSDPQRKLALPDPRLPTGNTPPGFIGYAVNMVNIDHPHLENLTTAGHGLRETLFYRLFSKLQVYETREHMENARACIKHSAISLDGGILRKNGIISLGYRNPEIHFPVQMHVSQQHKEIMEQIKKMKLELRSILQHIERISENHAKASKKFNKRKMKLEKCMDRMDSTIKYYHVEYAPNTLKSEEAPPM

SEQ ID NO: 537 - protein, 1261 aa, Glycine max
MVLFEMQNMWDSTPDTDLLLELPEEYTFETALADLIDNSLQAVWSNGEDKRKLIRVNLGKSKISIFDNGPGLDDTDENSLVKWGKMDASLHRSSKSKAIGGKPPYLMPYFGMFGYGGPIASMHLGRRASVSYKTKHVKKVYTLHLEREALLNTSSSQLTWKTGGGIRDPLANEIRDSHGSFTKGESSVTEYFNVLYRHWQQLDIYEKVSRCGTKDKKKYKELGTDRIYKFLLGLNKDLDEVRGRILGFKPLPKIREVFSKQEETSLDHHKRKTTPGVIIVRGQATPRKHAGSSMQFKSKEGRGNTAFNHQQAEVNSNSSSFSKEQMEALQTLFQQSMILELGKTIGNAEECVGLYLFQVEKPKELKNHSYVAASVPSSDNSVMWHCRLGHPNFILNRYKVRFVAKGFTQSYGVDYEETFALVAKLNFVRCDDTSDRGKTITPIEFKVNDVDLTEIQGGEVAITNWHSCNGPEFVFQLHLKSESSRELQANARMRFVYLPFTKGKENIERVLEKLKSDGFVISEDFQSFSRVSVRRLGRLLPDARWTLLPFMDFRNKKGIKAQILKRCSQRVKCFIETDGGFKPTLSKTDLAHHNPFTAALKNFGNKFSEKEKDVTVEIRKATKVLTLLKLQMEYQDWILQMHHQYDEEADSGEDQPVIIVGPANEKALGISSDVIRVHQVLNRKEKSWKRGQKIKVLKGACAGCHRTTIYATIEYFLLEGFEGDAGGEARIICRAIDIPDENGSFLSVGDEDASLEIRGSLSLPISVIDSGKVIAVESIEWENRLTKKQQKSTSIYLPGANHYENLETNGVVSVESIEWENRLYKKQQKSPSINLSGANHYEHLEADGVPVIKMPIVKYAGQPPCTDKGIIDLQEPSLYHENSLIEFFLNYDKELFDSICKLAERIQKVESHLNNSNEKKAETEQEMVKLLEKVEPYQLSIMDSSFTKDELMTKIRSMENSPYSVLCSLSKREKPPNYFLEDLIGVVALIGTVQRPELSRILAEYLGEAKMLGLIYRSFDTASSLEKYNQKGEIDYERALHAEAAALGKAISNRFHVICFEDIRPYTGWLHDDSQRRLALPNPRIANGETPEGFIGYAVNMVDLDINSLQIMTASDFGLRETVLFNLFKKLQVYNTRENMVAARTCIEDGAVSLDGGILSENGILSLGYGNPSICFPCENQKVLPREIEKILPQMEGKKSDLRMIEERIKGLEHSRAKYIKKFNKKKERYDKVTDRMKPMTELLKYKPEAGDGSNSSGRLS

SEQ ID NO: 538 - protein, 418 aa, Oriza sativa
MAVQSAERGVEAPPLTLSIFEFNSKVMQDELQKLALKVNHHEENIRFLKSELNAVEDSCADLGIKIGNYYSSMAAIANNDTSVEEAEQRTIQSILKQDETAAGIICQLKIRHYQHASKLPLMKDVLGVVATLGKINNDNLSRVLSEYLGLDNMLGVVCKTYDGVEGLETYDKEGMVDKTSGIHGLGRTIGKFLDGRFTVFCLENIRPFSGDFMIDDPQRKLLLHKPRLPSGEFPPGFLGFAVNMIHLDQANLSCLTAGGHGLRETLFYSLFSQLQVYKTRAELRNAIPLINDGAVSLDGSILRPNGSFCLGNRASLGIQFPVTANLGVSNLPVTITELEEQVKHKNWEKERLLEDIKRQEDLLNQVKDLFSKKKEQFMAYITQPGMLQRASQASPTIPSPATPGSNPFGSRPPHLRGR

SEQ ID NO: 539 - protein, 344 aa, Oriza sativa
MAAIANNDTSVEEAEQRTIQSILKQDETAAGIICQLKIRHYQHASKLPLMKDVLGVVATLGKINNDNLSRVLSEYLGLDNMLGVVCKTYDGVEGLETYDKEGMVDKTSGIHGLGRTIGKFLDGRFTVFCLENIRPFSGDFMIDDPQRKLLLHKPRLPSGEFPPGFLGFAVNMIHLDQANLSCLTAGGHGLRETLFYGLFSQLQVYKTRAELRNAIPLINDGAVSLDGSILRPNGSFCLGNRASLGIQFPVTANLGVSNLPVTITELEEQVKHKNWEKERLLEDIKRQEDLLNQVKDLFSKKKEQFMAYITQPGMLQRASQASPTIPSPATPGSNPFGSRPPHLR

SEQ ID NO: 540 - protein, 405 aa, Zea mays
MATPSLPTQIVEFNYKAIEDKLKRLALEVSHHENNIRFLKSQLNTVEEACVDLGIKLGNYHSSVAAVVNNDTSAQEAEQRTIRSILDQGKTAAGIICQLKVRHHELASKMPLMKDILGFVATLGKVNNDNLSRLLTEYLGMDNMLALVCKTYDGVKGLEKYDKDGIIDNTSGIHGLGRSVGKFLDGRFTVFCLENLRPFSGDVIIDDPQRKLILHRPRLPGGESPPGFLDFAVNMIHLDRAHLRFLTASGHGLRETLFYTLFSHLQVYKTRTDIQSALPLIKDGAVSLDGGLLRPNGSFCLGHSKNLEVKFPVTTDVSSLPENVAEMEEQVKRKNWEKEMVLEDMKREEDLLKQVKELYRKQKQELMDYVTQPAVTQMSRDSPATHSPATPGSNPFGAKLSNKWR

SEQ ID NO: 541 - protein, 388 aa, Sorghum bicolor
MEDKLKRLALKVGHHEDNIRFLKSQLNAVEDACIDLGIKLGNYHSSVAAVMNNDTSAQEAEQRTIRSILDQDTTAAGIICQLKVRHHELASKMTLMKGILGFVATLGKVNNDNLSRLLTEYLGMDNMLALVCKTYDGVKDLEKYDKDGIIDKTSGVHGLGRSVGKFLDGRFTVFCLENLRPFSGDINIGDPQRKLILHRPRLPGGESPPGFLDFAVNMIHLDRAHLSCLTASGHGLRETLFYTLFSHLQVYKTRADIQSALPLIKDGAVSLDGGILRPNGSFCLGDSKNLEVRFPVNIEVSSLPENIAEMEEQVKLKNWEKERVLEDMKREEDLLKQVKELYRKQKQELMDYLTHPAVAQTSRDSPTTHSPTTPGSNPFGAKPSHKGW

SEQ ID NO: 542 - protein, 663 aa, Arabidopsis thaliana
MSHDRSVNVSHDAVIAKPERGTMLQSFSPRSHGSKGYSLPQDSEENRGSVGQSAGQSSTSVVDQVRSPADDAGVTSSSTICPAPVCRQFWKAGSYNDELSSKSQQPNGKNYLHVHPMFLHSNATSHKWAFGAVAELLDNAVDEIQNGATFVIVDKTTNPRDGATALLIQDDGGGMDPQAMRHCMGFGFSDKKSDSAIGRYGNGFKTSTMRLGADVIVFSRHSKNQTLTQSIGLLSYTYLTRTGHDRIVVPILDYEFNASAGEFKTLQDREHFISSLSILLEWSPFSTEAELLQQFDDVGPHGTKVIIYNMWLNSDAKLELDFDSVAEDILIEGSIKKTGSKIVNDHIASRFSYSLRVYLSILYLRIPETFKIILRGKVVEHHNVADDLMHPQYILYKPQAAGSEEALVVTTIGFLKEAPKVNLHGFCVYHKNRLIMPFWQVINYSSSRGRGVVGVLEANFVEPTHNKQDFEKTVLLQKLENRLKEMTVEYWSCHCVLIGYQVNKKPRLQIPQKVQPAGRQALSPPPGFQAVFPQGNTTSLPRVSTQPVLLEKRKEHPDSVASAALKRKVGNDDFTVPGHIRVEQFIHGSASQSQDIETVKLMEENKKLRAKCLDRKVRSQNLEVKAMNLRSELENYKSEYERLMVELQALDLVKDEHRRNVNT

SEQ ID NO: 543 - protein, 718 aa, Solanum lycopersicum
MSSTNMVGLCSNNLGGGEIETVKLEPILVESLIPQMECCEADSLPYKKSSSSCGRQDSTATEQSRTSVLDQDQSPIDDSSLCSTSQICPAPLSRQFWKAGNYDEGHATKSTLKKGSSFLHIHPKFLHSNATSHKWAFGALAELLDNAVDEIQNGASFVIVDKTPNPRNGSSALMVQDDGGGMDPEAIRRCMSFGFSDKKSASTIGQYGNGFKTSSMRLGADVIVFSRCKKNRKLTQSIGLLSQTFLTRAGLDKIVVPLLDFEFSAAAKKWSSLHGEQHFRNNLSLLLRWSPFATEAELLKQFDDIGDHGTKVIVYNLWYNDEGRMELDFEADSEDIRLSGEANDNEKNASRIKVTDQHLANRLRYSLRAYLSVLYLRIPDNFCILLRGRVVELHNIAKDLKYPEFIMYKPQTLGFKEGSVITTIGFLKEAPVVNIHGFNVYHKNRLILPFWHVVRYSDSRGRGVVGVLEANFIQPTHNKQDFEKTPLFQKLEVRLKEMTWEYWDYHCGLLGYFPKKRPQGPITPQASSESRQQHGSYKPIVLGNSSGAVGSNITVRRTVTSEASSESRQQHGSYKPAVLGNSSGAVGSNITVWGTVTPVFQNNSKQGASKRKAVDHPIEHENLKRTAGLIVDLTGGERSQEILTLTSSGSQDQEAAHLIQENEKLRAQCCECEKREEELHSKVNKLRKELKEAQRTYAHMLVESRLLDKVKPEEDVYI

SEQ ID NO: 544 - protein, 830 aa, Solanum tuberosum
MWMQEDDLVVVEKDPGMSSTNMVGLCSNNLGGGETETVKLEPELVGSSLPQMEYCEADSLPYQKSSSSGGRQDSTATEQSGTTVLDQDQSPIDDSSLCSTSQICSAPLSRQFWRAGNYDEGRATKSTLKKGSSFLHIHPKFLHSNATSHKWAFGALAELLDNAVDEIQNGASFVIVDKTPNPRNGSSALMVQDDGGGMDPEAIRRCMSFGFSDKKSASTIGQYGNGFKTSSMRLGADVIVFSRCKKNRKLTQSIGLLSQTFLTRAGLDRIVVPLLDFEFSAAAGKWSSLHGEQHFRNNLSLLLRWSPFVTEAELLKQFDDIGDHGTKVIVYNLWYNDEGRMELDFEADSEDIRLSGDANDNEKSGSRIKVSDQHLANRLRYSLRAYLSVLYLRIPDNFCILLRGRVVELHNIAKDLKYPEFIMYKPQTLGFKEGSVITTIGFLKEAPVVNIHGFNVYHKNRLILPFWHVVRYSDSRGRGVVGVLEANFIQPTHNKQDFEKTPLFQKLEVRLKEMTWEYWDYHCGLLGYFPKKKPQGPITPQTSSESRQLHGSYKPVVLGNSSGAVGSNITVRGTVTSQVSSESRQQHGSYKPVVLGNSSGAVGSNITVRGTVTSQASSESRLQQGSYKPVVLGNSSGAVGSNITVRGTVTSQASSESRLQQGSYKPGCPGKLLWLHLNLDYNKGHINLVVLGNSSGAVGSNITVRGTVTPVFQNNSKQGASKRKAVDRPIEHENSKRTAGLVVDLTGGERSQEILTLTSSGSQDQEAAHLIQENEKLRAQCSECEKREEELHSKVNKLRKELKEAQRTYAHMLVESRLLDKVKPEEDVYI

SEQ ID NO: 545 - protein, 670 aa, Phaseolus vulgaris
MGPTEIVDLSSDDESETVCLKAVKLEGDFVMDKKCQSHTTGQDSEENLSSNGPSTGHSNSSVLEQGPSPVDDTCISYVSPIGAAPLCRQFWKAGNYDDGIGSKVTVQNAKNYLHVHPMFLHSNATSHKWAFGAIAELLDNAVDEIQNGATFVIVDKTSNPRDGSPALLIQDDGGGMDPEAMRRCMSFGFSDKKSQFAIGRYGNGFKTSTMRLGADVIVFSCHLNNRILTQSIGLLSYTYLTQTQLDRIVVPMVNYEFNTSTGSLEVLNGNDHFVSNLSLLLRWSPYSSEADLLKQFDEIGSHGTKVIIYNLWCNDDGNLELDFDTNSKDIRIAGDVKRIDTLKAWKSVNEDHIANRFRYSLHVYLSILYLKIPERFQIILRGQVVKPHNIADDLKYPQFVKYAPLIGGSTKGTALTVTTIGFLKEAPQVNIHGFNVYHKNRLILPFWQVVNYLDSRGRGVVGILQADFIEPTHNKQDFERTSLFQKLEVRLKEMTWEYWDTHCTLFGYKKEKRKFTPGVTSMQNPLTIEKPVILNKSSSSLVNAKAYGNSLQCSKNLQSLDQGSQSKRKKTHELVDLMNTQEHASTDNVACVGFSQNKQTMATPADQVGDQKNLHLIHQNKQLHAKCLEFEKTGEELNLKVVKLKSKIQEAQDEYKRLLAEIKSLDVKEE

SEQ ID NO: 546 - protein, 709 aa, Vitis vinifera
MSFPDIVDLCSDDEHVEVDVKPVKLEPNIIEREIQLFKCHEILQAQYQLSKTHCRTQESEENRDSNALSTAQSSTSILDQGQSPMDDTSLSSTSPICPAPLCRQFWKAGNYDDELGSKVTLQNGKNYLHVHPMFLHSNATSHKWAFGAIAELLDNAVDEIQNGATFVIVDKTSNPRDGSPALLIQDDGGGMGPEAMRCCMSFGFSDKKSKSAIGQYGNGFKTSSMRLGADVIVFSRHLDNGKLTQSAGLLSYSFLRQTGHDRIVVPMVDYEFNTSTSNMEPLHRYGKKHFTSNLSILLRWSPYSTEQELLKQFDDIGYHGTKVVIYNLWFSDDGNVELDFDSDPEDIRIGGDIKQVTTIPAWKTINEQHIANRFHISLRVYLSILYLRIPQNFNIILRGKVVEHHNIANDLKFPEFILYRPQTGGLVEGTVVTTIGFLKEAPQVNIHGFNVYHKNRLILPFWQVVNYSDSRGRGVVGVLEANFIEPIHNKQDFERTSLFQKLEGRLKEMTWEYWDYHCGLIGYQVKKKPRTLVSPHISSHGSPHIAMEKPIGLNQSSPAIGNIKATPPGGAFQHPAATASHCLAGRPGEPITDSQSRSQQGASLKRTEHDHPVEPEKKKHAGIKEIVTDTHSQETQPVDIFANHSKDQEAMTLMQENKKLHAQCLEYEKREKELSVKMIQLRNELREVHNEQARLLAELQHLDAIKDEK

SEQ ID NO: 547 - protein, 692 aa, Theobroma cacao
MNCVEIVDLSSDDELGEVDVKPVKLEPGTVVGSTTKQKNNHRFQPVELVKYKTQSGKQASEENKSSNNALSTGQSSTSFLEQGQSPGDDTGVSSTSAVSPAPVCRQFWKAGSYEGGLGSKVTLQNSKNYLHVHPLFLHSNATSHKWAFGAIAELLDNAIDEIQNGATFVIVDKTSNPRDGSPALLIQDDGGGMDPEAMRRCMSFGFSDKKSKSAIGQYGNGFKTSSMRLGGDVIVFSRHLDNRSLTQSIGLLSYTFLTRTGHDRIVVPMVDYELNVSTGMLDVLHGREHFVSNLSILLQWSPYSTEAELLKQFDDIGSHGTKIIIYNLWLNNDRDSELDFDSDPKDIRISGDTKKVNTIPAWKAVNEQHIASRYHISLRVYLSILYLRIPDTFRIILRGEIVEHHNIADDLKFIEYILYRPQSFGSVEGTVVCTIGFLKEAPQVNIHGFCVYHKNRLILPFWQVVSYSDSRGRGVVGVLEANFVEPTHNKQDFERTSLFQKLEGRLKEMTWEYWDYHCGLIGYQVKKKSRPAASHVSSHFTGQSSAEQPVLLNQTSLDADRAKTGCTDVGVKQSITNSHGRSMQGLPTKRKEPGDLANLEKVKRQAGTSANTVVQPVDTTANHSKDQETIYLMQENKKLRAKCSEYEKRREELNIKVEKLRSEVGEVQREYYRLLAELNSLDIVKDENDVYM

SEQ ID NO: 548 - protein, 664 aa, Triticum urarte
MRSGGAAEVIDLSSDDDGESLPFPSTSAVTVAPSSTRDAKPYELADVKPLLYPIQHPGCYALVPVKDEDPVPLPLAAKAPRVLPPPRLCRQFWKSGEYVVARRNPDADAPGGRNRLRINPKFLHSNATSHKWAFGVLTSLIFAAIAELLDNAIDEVNNGATFVRVNKFTNPRDGSPSLLVQDDGGGMDPDALRCCMSFGFSDKQSDAFIGQYGNGFKTSTMRLGADVIVFTQNQKNWTPTRSIGLLSYTFLMETGCDDVLVPTVDYQYDLTTASYTQLLRHNQKLFSSNLAILSKWSPFASEAELLKQFDDIGEHGTKIIVFNLWFNDDGDMELDFNSDKKAYASILYLRVPDSFRIILRGQDVEPHNVVNDLLYRECVLYKPQIAGLPELSIVTTIGFVKGAPDTDVQGFNVYHKNRLITPFWKVASNSYGKGRGVVGILDASFIKPTHDKQDFEKSVLHQRLENRLKEMTYEYWGLHCHRLGYDNKSLPKASRALYRAKQTGAGSSPASVPHQLLTADIPTSSCVQSSMGQKRNFDALGVISDINNHQTKARETSSMGIYLFCLHRDVIQRKRFHEYKTLTLENDKLRDECLQYEESEKQLVEKKSTILVKFSHIIFNLLIEIMVYFTIVKEQKLRYQIAKETKKYEELLEELKLLDVKLET

SEQ ID NO: 549 - protein, 688 aa, Glycine max
MGPTEVVYLSSDDESEKEVAFKAVKLEEDFVLDAKQYNETNKGQLAKHKRSQSHTTGQDSEENLSSNGPSTGHSNSSVLEQGPSPVDDTGISYASSIGVAPLCRQFWKAGNYDDGLGSKVTVQNAKNYLHVHPMFLHSNATSHKWAFGAIAELLDNAVDEIQNGATFVIVDKTSNPRDGNPALLIQDDGGGMDPDAMRRCMSFGFSDKKSQFAIGRYGNGFKTSSMRLGADVIVFSCHLNNRILTQSIGLLSYTYLIKTQLDRIVVPMVNYEFDTSTGSLKILNGNEHFVSNLSLLLRWSPYSSEADLLKQFDDIGSHGTKVIIYNLWCNDDANLELDFDTDPTDIRIAGDVKQIDTLKAWKSVNEEHIANRLRYSLHVYMSILYLKIPESFQMILRGQVVKPHNIADDLKFPQFVKYAPVIGGSVKGTALTVTTIGFLKEAPQVNIHGFNVYHKNRLILPFWQVVSYLDSRGRGVVGILQADFIEPTHNKQDFERTSLFQKLEGRLKEMTWEYWDTHCTLFGYKDKDKKKLPPRVTSMQKPLAIEKPVMLNRSCSPVVNTKIEYGNSEQCSTKLQIRSEQGSHNKRKTHELVDLQNTEKHARTENVTCVGFSQNKQIIATPADQVFDRKTMHLVQQNKKLHAKCLEFEKTGEELNLKVTMLKSEIQEAQDEYKRLLAEVKSLDLKEE

SEQ ID NO: 550 - protein, 682 aa, Oriza sativa
MRSTAAAADVIDLSSDDDDEVPVPSTSAAAAAAARRVAPSTSPRDVTPYALVDVKPALLYPLQPPGVVVGGSGALVPVKEELPVLTPVPLLAAGYSPSTPSTKVALPAPRLCRQFWKSGDYVVAQRNPDADAPGGRNRLRINPRFLHSNATSHKWAFGAIAELLDNAIDEVNTGATFVRVNEFTNPRDGSSSLLIQDDGGGMDPEALRRCMSFGFSDKQSDALIGQYGNGFKTSTMRLGADVIVFTQNQNNWVPTRSIGLLSYTFLMETGCDDVLVPTVDYQYDISTASYTQMLRHDQKLFSSNLAILLKWSPFASEAELLKQFDDIGEHGTKIIVFNLWFNDDGDMELDFNSDKKDILITGAHRKVNTNKADKVATQNYVSTRLRYSLRAYTSVLYLHIPDNFRIVLRGHDVESHNVINDLMYPECVLYKPQIAGLAELSAITTIGFVKGAPEIDVQGFNVYHKNRLIAPFWKVANNSYGKGRGVVGILEANFIKPTHDKQDFEKSVLYQRLESRLKEMTYEYWDLHCHRIGYDNKKLPKSSRALNRANQMNAGSSPPIVPRQLLAADIPTSSCAVPTFMAPALRQKQMGLKRNIDALGSKTDSADQDGSHLDVSQRRRFNEYRTLTLENDKLRGECLQYEESAKQLALKEQKLRSQIALERKKYEELLQELRSLDVKTEK

SEQ ID NO: 551 - protein, 648 aa, Oriza sativa
MRSTAAAADVIDLSSDDDDEVPVPSTSAAAAAAARRVAPSTSPRDVTPYALVDVKPALLYPLQPPGVVVGGSGALVPVKEELPLLTPVPLLAAGYSPSTPSTKVALPAPRLCRQFWKSGDYVVAQRNPDADAPGGRNRLRINPRFLHSNATSHKWAFGAIAELLDNAIDEVNTGATFVRVNEFTNPRDGSSSLLIQDDGGGMDPEALRRCMSFGFSDKQSDALIGQYGNGFKTSTMRLGADVIVFTQNQNNWVPTRSIGLLSYTFLMETGCDDVLVPTVDYQYDISTASYTQMLRHDQKLFSSNLAILLKWSPFASEAELLKQFDDIGEHGTKIIVFNLWFNDDGDMELDFNSDKKAYTSVLYLHIPDNFRIVLRGHDVESHNVINDLMYPECVLYKPQIAGLAELSAITTIGFVKGAPEIDVQGFNVYHKNRLIAPFWKVANNSYGKGRGVVGILEANFIKPTHDKQDFEKSVLYQRLESRLKEMTYEYWDLHCHRIGYDNKKLPKSSRALNRANQMNAGSSPPIVPRQLLAADIPTSSCAVPTFMAPALRQKQMGLKRNIDALGSKTDSADQDGSHLDVSQRRRFNEYRTLTLENDKLRGECLQYEESAKQLALKEQKLRSQIALERKKYEELLQELRSLDVKTEK

SEQ ID NO: 552 - protein, 750 aa, Zea mays
MCMSSLIAPTRPRRLSFENSKRLEEASTDYMDAERDIKPFVFPTVPTTIQRNFHGPGARQPTARPLERCGTRVLPQTHRPCSAPRLSRKFWGAGDYDAVAGRSAPQPPSLQNRMCVHPEFLHSNATSHKWPFGVCLTFFPIAIAVAELLDNAVDEIETGGATTILLDKLIDKRNGSPALLIQDDGGGMDPDSLRRCMSFGFSEKQSGSSIGQYGNGFKTSTMRLGADAIVFSRCCTRSSGPTQSIGLLSYTFLVETGHTNVVVPMRLERHGSKQFFSNLSALLKWSPFATEEELMQNFCDIGPHGTKIIVFNLWSNDDGNLELDFDTNPEDIMISGAPNPEQISNSVRRANENHLANRLRYSLRVYASVLYLQLPDYFRIMLRGREVERHHIASDLIYPERISYRPQSCGIIREAEVLTTIGFLKGAPTISVHGFNIYHKNRLILPFHRVLSTASSKGRSVSGVLEVDFIKPTHDKQDFEKSQLFQRLMNRLKEMTNEYCTDAYFASNVTTQMSRSFHRDLYSNKIGYVKVPRVRAAPTPAPPVMLAIENGPAEPSERSAPAPTQPLRWQHGNSSCVNAVPIAMAPPAFHPAPVKTETDAPGAPTGYAYSYSPSWPSVQAMQIEKIKEEPSMAAPGTDWVETRKRTNDDGATTVALFKRRKAPQELAGSGSRSATDQVSRYVGEGELNEFCFLKMENRMLRGECSEFEMAEKELRVKEQNLRLEIEMAQEQFKRLLGEYVSFSSMPTRKP

SEQ ID NO: 553 - protein, 676 aa, Sorghum bicolor
MSLGAEVIELSSDEEEEPVPSTTALARHAPSSPPDVKPHLFADVDVKPLLLPPPLHPPGYGALVPVKTEEPVPVPVATVSPPPRALPPPRLCRQFWKSGDYVVARRNPDADVPGGRNRLRINPKFLHSNATSHKWAFGAIAELLDNAIDEVNNGATFVRVNKFKNPRDGNPSLLVQDDGGGMDPEALRRCMSFGFSDKQSDAFIGQYGNGFKTSTMRLGADVIVFTQNQNNWVPTRSIGLLSYTFLMETGCDDVLVPTVDYQYDPTTTSYVQMLRHDQKLFSSNLAILLKWSPFASEAELLKQFDDMGDHGTKIIVFNLWFNDDGDMELDFNSDKKDILITGAHKMVKTNNPEKIAAQKYVSTRLRFSLRAYASILYLHVPDTFRIILRGRDVEPHNIVNDLMYRECVLYKPQLAGLTESSVITTIGFVKGAPDIDVQGFNVYHKNRLISPFWKVANNSYGKGRGVVGILEANFIKPTHDKQDFEKSVLYQRLEIRLKEMTYEYWDLHCHRVGYDNKKLPKAIRAVNRANHMNGGSSPISAPPRLLAADIPTSSCGIPRLSASAAREKINSLDSLSKSPMGLKRKFNSFSAMAGSADQDGLDHMDKVDVSQRKRFNEYKTLTLENDKLRNECLQYEESEKQLVLKEQKLRSEIAEAEKKYQELLVELRSLDVKKEK

SEQ ID NO: 554 - protein, 740 aa, Arabidopsis thaliana
MRSYNLFHESNPTISFSFVGAETMAPNLHIKKAFMAMRAMGIEDARVKPVLKNLLALYEKNWELIAEDNYRVLADAIFDSHEDQAIQESEEKKADEVKEDEGCAAEVDRGKKKLHESIEDDEDVMAESDRPLKRLRRRGEGGSALASPSLGSPTLEGPSINDEENAPILLPYHPVPIENDHDAGELILTKVEPITNMPLSSIPDSVDRGDSSMLEIDKSNGHVEEKAGETVSTADGTTNDISPTTVARFSDHKLAATIEEPPALELASSASGEVKINLSFAPATGGSNPHLPSMEELRRAMEEKCLRSYKILDPNFSVLGFMNDICSCYLDLATNGRDSANQLPKNLPFVTTNIDALKKSAARMAYTSQASNDVVEICSNEHMRDAENGAVGDSMALVVVPECQLSADEWRLISSVGDISLGKETVEIPWVNEVNDKVPPVFHYIAQSLVYQDAAVKFSLGNIRDDQCCSSCCGDCLAPSMACRCATAFNGFAYTVDGLLQEDFLEQCISEARDPRKQMLLYCKECPLEKAKKEVILEPCKGHLKRKAIKECWSKCGCMKNCGNRVVQQGIHNKLQVFFTPNGRGWGLRTLEKLPKGAFVCELAGEILTIPELFQRISDRPTSPVILDAYWGSEDISGDDKALSLEGTHYGNISRFINHRCLDANLIEIPVHAETTDSHYYHLAFFTTREIDAMEELTWDYGVPFNQDVFPTSPFHCQCGSDFCRVRKQISKGKNVKKRA

SEQ ID NO: 555 - protein, 783 aa, Solanum lycopersicum
MAPNSKSRVTKAFEAMKVFGYSETVVKPVLRNLLNLYNKNWKLIEDENYSVLLESIIDSEESKEKQKSSMEDEPEENEPPLKRSRLYSQGNHSSAAKHDAGPSVDTCTSELQPYGKQKMADITTESCETQDVEMKPRFLLNHHQRKGKKQISSEASPVSEEDNDIVVLSDDDKQETRILSSHLKLKKRGDTSRLYSAVKPKRRLAYSSSLEEPNVMGSTDVSKEGALVEYSFSDAMPLSDTLPGFDVPLAVVPSDLERLNSEHLGTEGNKEDATNSSRLNIASTPNGEVKLSFVYKIYSSSDFCPPSLDAVFKRMEEKYMKSYRFSQPGFLLSLMENLCKCYLTAGTRTRTANEPSAGIWSQKLHPVGVRYDATNHELHFAPDTSNGSFKLSNLIKILPQIPTFTASGNRDIMCYMVDFNGTRINGAEKDNTNKLLKLLASSTMNNSVLVQSEHSSPGLRNSVYYIEDISNGQEEHKISLINAFSHVLPVFKYIPKNVIFQNAYVKFLLARISDDSCCSNCSGDCLSQDIPCACAGETGGEFAYTSGGLLKEKFLESCISMSCEPQKHGLVYCQDCPLERSKNNSVSGLCKGHLVRKFIKECWHKCGCSRGCGNRVIQRGIAVPLQVFMTADGKGWGLRALEDLPRGAFVCEYVGEIVTNTELYERNTQTASERHTYPVLLDADWGSEGVLKDEEALCLDATYYGNIARFINHRCYEGNLIEIPVEVETPDHHYYHIAFFTTRKVNALEELTWDYGIDFTDHTHPVKAFKCCCGSKSCRDTGL

SEQ ID NO: 556 - protein, 865 aa, Solanum tuberosum
MPVNPRVKKAFRAMKSIGISEEKVKPILKSLLKLYDKNWELIEEENYRALADAIFEKEDSEVAEHKKPENNEVRDMPLVQREEVLEEEAVPEEPERPLKRLRLRYQEGQASPSSNNSSAGTSLKRPRREEEGELSGPRYQNQSQGEANPSSVRKNLRLNETQTSPIASRGQNSVAAKSSHAVKLKEPKTEPGVELSSKQKMSGSLALIKPKDEPYTDDMPQFEVPIAVIHPELSNKGDTSSGNTSRRHSETPELLAIELRGGRDSSEEITTSLNGVKTSRELIEVQDRCHTDVDIASSPSGEVKISINWDPALCRSSDFHTPSVESVMKMVELKCLKSYKILDPNFSLMKLMKDMCECVLELGTQHSPELQSTTDVAAENDFGSRSMTVNSSNGFMNFEIDAGDAQPKIPRPSPPRIGEDYIQAGQIASMGNCGSTPETDQNGIEQTNPWSMEAPCELILGEIGTFDSLNELLNSDLGAGEAQPEIPHLNSYFGEDSTQADHTASMGNCGIAPETSQSRLEEVVSHEATPRDVGSVEVIDITKGQENVIISLVNEVNSNHPPSFHYIASNVVFQNAYVNFSLARIGDDNSCSTCSGDCLSLSTPCACAHITGGDFAYTKEGLIKEEFLKECISMNRDPKKHCQFFCKECPLERSKNEDIIEACKGHLMRNFIKECWWKCGCSKQCGNRVVQRGISHKLQVFMTPEGKGWGLRTLEDLPRGAFVCEYVGEVLTNTELFDRVSRSPNGEEHSYPALLDADWGSEGVLKDEEALCLDATFYGNVARFINHRCFDSNLVEIPVEIETPDHHYYHLAFFTTRKIKAMEELTWDYGIDFDDLEHPVKAFSCHCSSKFCRNMKRPSRSRSRR

SEQ ID NO: 557 - protein, 824 aa, Phaseolus vulgaris
MAPNKRVVAAYRAMGSLGIDESKVKSALKKLLKVFDKNWELIEAENYRVLADAIFEEDDNTVPKLKKKIQSDDVHSTCHSLPSFSNNQEDETESEEAQMHNERAQPLKRLRLRDQESQPLHPLTNSATSPPSKRPKLEDNALHQGSFGKKPQNKPESSDGNPRIEAPSLRLPDDIVDKGKQPASTQVLQRGRKLTSGRSSPSTPSKEPTVESGKFLLPNNMMPRTQALIIPKDEPIDEVPDYEMPIAVIPPEPSSVRDSSLKNGVAGKHVSHVTVTSSECRDGVRDEDASPTSNEEATCNVEIASSTLGEVKLSLSCSSALWGSKFHMPRRDEIIEMMEEKCLFSYKIADPNFSVMKLLRDLCDCMLEFGNNSNNDPEESSILRSNVDVSKESQEPGTLDVVRNKDLDMLSDVSNGPINVSPSAAVASPQSFLLLADLNGVNDAVLDSKMDQTTNDFSQCNVRKELECPISPNSHSLVIVPQDQLTADDIRSFYDISDLTKGEENVEIPWVNEYTNDFPPSFNYIPQNLVFQDAYVNISLSRVGSEDCCSTCAGNCVLSIPCACANKTGGEFAYGSRGLLKEQFLNSCIAISRNPQKHFFYCKNCPLDRIKNDGGLEPCKGHLKRKFIKECWSKCGCGKHCGNRVIQRGMTCKLQVFFTSEGKGWGLRTLEDLPKGAFVCEFVGEILSIKELYERNMKCTGEGKHTYPVLLDANWDSGHVNNKEALCLDAASFGNIARFINHRCFDANLVEIPVEVEDPGHYYYHFAFFTSRKISAHEELTWDYGIDFDDHDHPLKLFQCSCGSKFCRHMKRSNRSNISASISE

SEQ ID NO: 558 - protein, 848 aa, Vitis vinifera
MARNPRVLAAYRAMRALGIAEATVKPVLKNLLRLYEKNWELIEEENYRALADAIFEYEETKQDNILGGETQLHDEPARPLKRLRLRNQESQVSPSLANSSQTLGGAVMKRPKLEDAEQPQTLAERQPQGIAETPEPSVGNIRPELHPVSSPQAHLVNKGKQPALPQPLAVQGRSDLSPTSATKRAESDLLHTQQRLRDKGKEPLSPQIAAKEKRSIPVRSFHLNAEPGIILSPKQKVHDTPALMKPKDEPFTDDILQLEVPIAVIHPDPLHKGNLPENYSTGKLDGPQPPVNSRVDGEDEVNGGPASSSGAGTNCELANISNLEIASSPLGEVKISLSCNSALGKPDFRMPSLDTLLKLVEDKCLRSYKIIDPNFSVTKLMRDMCDCFLELGTHTEESHEGSINTTPTGDLLGKSTAPDAVGSCGDEENFSMSSCITNGSFKIQCSTEVAVPQIPRLLSSSLNGLGDHIQLDSKITENSCRENGQEKETNGPNNANSLSLVVVQQRQLTPDDIRFIHDVDDITKGEEKVRIPLVNETNSEFPTPFHYISQNLVFQNAYMNLSLARIGIENCCSTCFGDCLSSSTPCACACESGGDFAYTLEGLVKEDFLEECISRNRDPQQHQLAFCQECPLERSKAEDILEPCKGHIVRKFIKECWSKCGCSKQCRNRLVQRGITCNFQVFLTPDGKGWGLRTLEDLPKGSFVCEYVGEILTTVELYERNMQSTSRGKQTYPVLLDADWALRGILKDEEALCLDATFYGNVARFINHRCLDANLVEIPVEVESPDHHYYHLALFTTRKVNALEELTWDYGIDFDDQDHPVKTFRCCCGSKFCRNMKRTRSRSALSLG

SEQ ID NO: 559 - protein, 811 aa, Theobroma cacao
MAPNPRVVQAFRSMKEIGITEEKVKPVLKKLLKVYDKNWELIAAENYRVLADAIFEEEDNKVSEPKKGQKCDEEEDTMEEGAVPDELVRPLKRIRLKNQEGLASSSHNNGSTDVAGPFLKKPKVEEDELPPASLRQQSLQCNVGNMTECLPASPGCVSLQPTAPGPVSPHQGGRNKGKQPVAPMPLAVLEGYDQNLHSTQMHVSYKGKEPMSPHVTYNEKGPERVSLALCIKDPAPCPGIITKKRMPDTHALIIPKEEPFTDDMPQDEVPIAVIHPDSLSRRDSPIGHVSTGKSNWQEHPESLFADENVGAGASASMSERHISCELATVPDEIPSSLEIASSPLGEVKISLSYNSALGRSNFQLPSIDELRELMEQRCLRSYKLIDPTFDVIKILNDMCECISELATNSSNQSQEGNVMPALDLLKKSPARDALDAESNKENGCLPAKMLNGALDVQCSSNGCVDNVEGKELVVVQQHQLTSNELRWLHDASDITKGEEKVEISWVNEINKDFPPPFHYISENLVFQNAYVKFSLSRIGDESCCPTCFGDCLLSEQPCACACQAGGKFVYTSAGVVREDFLEECISMTRDPQRQCFLNCTECPLERSKKDDFPEPCKGHLKRKVIKECWSKCGCNKQCGNRVVHRGVNYKLQVFLTPDGKGWGLRTLEKLPKGAFICEFVGEILTISELYARNTEKHTCPILLDAYWGLKGVSKDEEALCLDATGYGNVARFINHRCLDANLIEIPVEVETPDLHYYHLAFFTTREIDALEELTWVSEWDYGIDFDDLDHPVKAFRCRCGSKFCRNMKRST

SEQ ID NO: 560 - protein, 761 aa, Triticum urarte
MGSSRGNRNVRARRAVKAMKLLGISREQTAPVLRRLVELYDDNWQLIEAESYRALADAIFDEQANGGPANGGDQVQGQEELDLELEETGTMPEMFTPEDDDQRPSTSLAVVRKDPDNRITAPRSRTGSRANLLGSDPTQAASPTQTRALSKQRQMQMQMMDEDFQQPVFLREPKPEPVDMDAVDCLNVQPGLIHRSRKRSAPSSEFLALPPPEQTPKQISEGDKNRTTQHCRNREMPTLSVEPANSTMNNGTGSGDGNVQEAPCLDIDIASSPRGDVKMSLKFCIDPSKFHMPALEAVLKMVEDKCLRSHKVLPPDFSIRGLMTEMCQCVVQLGTKHTAEHNTQSDTVGNGSLSENAINRKRKAREEPLVSKGSESGPANSTLAQQHHLALSVSKTIHDITDISKGEENVRISIADESGREKCPPSFYYMPTNAVSQNALISMFLAKIGSEDCCPECFGNCLSAPAPCACARQTGGEYAYTPDGLVKPAFIDECVSMNRFPEEHHRVYCKTCPLERSKNKASPEPCRGHLVRKFIKECWSKCGCNMQCGNRVVQRGIRCNLQVFFTEEGRGWGLRTLDDLPKGTFVCEYAGEILTNTELHERAIQNMQNARYTHPILLDAGWCSGGEPKDEEALCLDGTFYGNVGRFINHRCCDANLAMIPVEVETPDHQYYHVAFFTSKKVEAFEELTWHVCNLCSYRQMSQRARLPKPMYLQRLTNLMDYGIDFDDERQPMKAFECLCGSRYCRGGKERRRSRVTGTAG

SEQ ID NO: 561 - protein, 857 aa, Glycine max
MAPTPSQKERALAACRAMSSLGIDDSKVKSVLKKLLKVYDKNWELIEAENYRVLADAIFEDDDNMEAETGCEEAQMHVETPQPLKRLRLQGQESQPLHPPPNGSPSPSSKKLKLDDNASGKKPQNKPVSSDGNPGIATRPLPPRDGIVDKGKQPASLPLNHRGRRLPSERVPQSIPSREPTVEPGRFLLPNNQMPRTQTLVIPKDEPIDELTDYEMPIAVIPPESSVRNSSIKNGVAGKHSGHVTVTSSQNRDGVGDEDVIPTSKKEATCNVEIASSTLGEVKLSLSYGSALQGSDFHIPSRDQLIKVMEDKCLRSYKITDPNFSVKNLLRDICDCMLEFRNDSNDDSQEGSVISSSVDVSKEPRAPGTLSVVGNKDLDTSSHFSNGSINVKSSDDLVSPGSILPLAHPNGLSDAVPVSKMDRTNDFLQSNVKKDLEDPMSPNSHSLVVVPQHQLTADDIRSFHDANDLTKGEENVEIPWVNETTNDFAPSFNYIPQNLVFQEAYVNISLSRVGSEDCCSTCMGNCVLSSSCACANKTGGEFAYNAQGLLKEEFLEECIAISRNPQQHLFYCKNCPLERSKSDGCLEPCKGHLKRKFIKECWSKCGCGKQCGNRVIQRGITCHLQVFFTSEGKGWGLRTLEDLPKGAFVCEFVGEILSMKELHERNLKCTENGKYTCPVLLDANWDSGYVKDEEALCLDAASFGNTARFINHRCSDANLIEIPVEVEDPGHYYYHFAFFTSRKISAQEELTWDYGIDFDDHDHPVKLFQCRCGSKFCRNMKRYSSKFNLQLLGHHHKPTMIVMKYRAPLQYWSGVLLIDAIIFHHISFSSHWIAWLIVGKALDLLDMRQLQDDSLSP

SEQ ID NO: 562 - protein, 741 aa, Oriza sativa
MAKPNGKEKTGDTGLSMAPPKISKDRFDAAIRAMADIGILKETAAPVLNNLLNLFDYNWVHIEADNYLALADAIFCDSDPKEGQKRQANETNLDADQSNKKLKTKKRSQNPTSKMHGNDNREFVEAPPQQGRGTLSARTVNGKKVTRAHLELPSSQLLIKEPHTCPSIAKNTTIVENNSAVLCHGQDLQTFEVPVATTCPQVVAPSTRKDARRTSGARHDQKHEGVSGAHERNRAVACSNQEIVSSKDSPSNIEVVLSNYGAGKLSFTYNSSLANRSDFHLPDIKLICKKMEARCLRKYKSLEPNFSFKNLIKDTCQCIVESSGPRHEGIIQTVPALDILSKPSVPQILQSNQANSAFMPPNNVMSLGGTSSSCTVAGVSQNSSNMPVVPHQLHIGANRPPHDVNDITKGEERLRIPIINEYGNGILPPPFHYIPHNITLQEAYVNISLARIGDDNCCSDCFRDCLAQSLPCACAAETGGEFAYTTDGLLKGAFLDSCISMIREPLKHPHFYCKICPNERMKIEVNSDSSNTEMNPGPCKGHLTRKFIKECWRKCGCTRNCGNRVVQRGITRHLQVFLTPEKKGWGLRSTEKLPRGAFVCEYVGEILTNIELYDRTIQKTGKAKHTYPLLLDADWGTEGVLKDEEALCLDATFYGNVARFINHRCFDANIIGIPVEIETPDHHYYHLAFFTTRIIEPFEELTWDYGIDFDDVDHPVKAFKCHCGSEFCRDKTRRSKSRARV

SEQ ID NO: 563 - protein, 736 aa, Oriza sativa
MGSKSNTERARKALEAMKQLGFSKKEATPVLKNLLRLFGNNWEPIEDECYRALADAILDRHQETAADRGCSATRPTPDDDHHPLTLCGASRDVDTETDEPRTKKPRATNSDPQSPPSLTDDQDVPAAISPPSHGASPQFRPQTRASARLRQASPSSVTAAHKRPRQMMDEDFQDSAFLREPKPEPDIDMDAIQGTAATSDCPNAHLGLIDYPLNASSSRVALPLALLPPDQNVPQISGPKKRAIQPCSKVNTGEGSSVIDVASSTMGEVKMSLKCSVDPKFRMPSLEAVFKMVEDKYLHSYKILPPEFSIGSLMNEICQCVVQLGSDHIAEHNTESDVAGNGRCSQNEPMTGSIPFVKPIACEDGGNRKCKSAGESFIVEDSENSSVAKQKTHLALANLKPIHDVTDISKGEERVRISVANEFASEKCPPSFYYIRGNLVFQNAYVNISVARIGDEDCCADCFGNCLSAPIPCACTRETGGEYVYTPEGLVRTPFLDECVSMNRFPEKCHKFFCKSSCPLERSRNEASPEPCRGHLARKFIKECWSKCGCNMQCGNRVVQRGITCNLQVFFTGEGKGWGLRTLDELPKGAFVCEYVGEVLTSTELHERTLQNMNNGRHTYPVLLDADWGSEGVLKDEEALSLDSTFYGNVGRFINHRCYDANLVEIPVEVETPDHHYYHLAFFTTKKVEAFEELTWDYGIDFGDGKDPVKAFQCLCGSRYCRGIRHPRKRGKAAAK

SEQ ID NO: 564 - protein, 720 aa, Zea mays
MGSNTERARKALGAMKLIGFSKKQAIPVLKELLKIFNNNWEPIEDESYRALADAILDRQDSKQTPPSQQGTQAAHADLEPLRSTRDDRQQYLSASLDDTCEDDNETPLVKRPRMGTANFRPELQPPQQSSVSTQGALPASPQTSRRQTRSLTVEPHAAGHEYPLAVNDALVVKEPKPEPQIDRAEDFVAGPNATQLNDGSSEQTSGFGARGNIVHQAQSLGRSLQAAAVCKNGVGSTVQNTHETSIVEVDVASSANGEVKMSLKCSLGSSNFSISMEEVFKMVEEKCLHSYKMLPSDLSIGKLLSEVCQSVVQLGTMHSEVNRDSGSLHNEVVVPFVKPISCEAAVGISDDVAGGSSVLESSEPCLQNSLVAWNPELAHCNQKTTHDTTDISKGEERVRIPVVNEFGSETCPPSFYYIPRNLVFQNAYVNISISRICDEDCCADCSGNCLSAPVPCSCARITGGEFSYTLEGLLKTAFLDECTSVNHFLQEHHRFYCPVCPLERSKNEGSPGPCKGHIVRKFIKECWSKCGCGMQCGNRVIQRGITCKLQVFFTREGKGWGVRTVEDLPRGAFVCEYVGEILTSAELHERAIENARNGKHMHQVLLDAGWGSGVVLRDEDACSLDGSFYGNVGRFINHRCYNANLVQIPVEVETPDHHYHHLAFFTNKKVEAFEELTWDYGIDFDDMEGPSKPFRCMCGSRYCRDPNNPRRMGRAAAKRK

SEQ ID NO: 565 - protein, 739 aa, Sorghum bicolor
MGGKNMERARKALDAMKELGISRKQATPVLKELLATFDNNWEPIEDEHYRALADAIFAREDNKQTSPSQQGAQAAHVDSEPNGSTWDNRQQYFSATHDDTGEDDNETPLVKRPRMGTANFRSEPQPFEPGPQQSTVSTQGALPASPQASRRQSRSLAVVPHAAGHEYPLAVDDALIVKEPKPEPQIDISEVSVGDPLTDRDFLAGPDAIRLDDGSSGSGARGCIVNQPQSLGRSLQPAPVCENGVQSTVQNTQETSFVEVDVASSTNGEVKMSLKCSLDSSNFSISMEEVFKMVEEKCLHSYKVLPPDFSIGKLMSEVCQSVVQLGTVHSEINRDSGSLHNEAVAPFVKPIACEASVGINGNVAGGSSVLETSEPCLQNSLVAWDPELAHRKQKTTHDITDISKGGERVRIPVVNEFGSETCPPSFYYVPRNLIFQNAYVNFSIARIGDEDCCADCSGNCLSASVPCACSRLTGGEFPYTPEGLLKPAFLDECTSVNHFPKEHHRFYCTVCPLERSKNEASPGACKGHLVRKFIKECWSKCGCGMQCGNRVIQRGITCKLQVFFTREGKGWGVRTVEDLPKGAFVCEYVGEILTSAELHERAIENARNGKHMHQVLLDAGWGSGVSRDDEGSGVLRDEEALSLDGSFYGNVGRFINHRCYDPNLVQIPVEIETPDHHYYHLAFFTNKKVEAFEELTWDYGIDFDDVEGPSKPFRCMCGSRYCRDPNNTRRMGRAASKRK

SEQ ID NO: 566 - protein, 888 aa, Arabidopsis thaliana
MGFVYIVMTGYYKNVHKRKQNQVDDGPEAKRVKSSAKVIDYSNPFAVSNMLEALDSGKFGSVSKELEEIADMRMDLVKRSIWLYPSLAYTVFEAEKTMDNQQVVEGVINLDDDDDDDTDVEKKALCVVPSSSEIVLLDSDDEDNERQRPMYQFQSTLVQHQKNQGDVTPLIPQCSFEEVDLGRGKEMPSAIKAIVEGQTSRGKVLPIENGVVNEKGVYVGVEEDDSDNESEAADEDLGNIWNEMALSIECSKDVARETSHKEKADVVEDCEHSFILKDDMGYVCRVCGVIEKSILEIIDVQFTKAKRNTRTYASETRTKRFGESDNELKFSEEGLMIGGLAAHPTHAAEMKPHQIEGFQFLCSNLVADDPGGCIMAHAPGSGKTFMIISFMQSFLAKYPQAKPLVVLPKGILPTWKKEFVRWQVEDIPLLDFYSAKAENRAQQLSILKQWMEKKSILFLGYQQFSTIVCDDTTDSLSCQEILLKVPSILILDEGHTPRNEDTNLLQSLAQVQTPRKVVLSGTLYQNHVKEVFNILNLVRPKFLKLDTSKSAVKRILAYTPCDVRGRLTGSNSDMASMFNETVEHTLQKSEDFTVKIKVIQDLREMTKKVLHYYKGDFLDELPGLADFTVVLNLSPKQLNEVKKLRREKRKFKVSAVGSAIYLHPKLKVFSDKSDDVSDTTMDEMVEKLDLNEGVKAKFFLNLINLCDSAGEKLLVFSQYLIPLKFLERLAALAKGWKLGKEVFVLTGNTSSEQREWSMETFNSSPDAKIFFGSIKACGEGISLVGASRILILDVPLNPSVTRQAIGRAFRPGQKKMVHAYRLIAGSSPEEEDHNTCFKKEVISKMWFEWNEYCGYQNFEVETIDVDEAGDTFLESPALREDIRVLYKR

SEQ ID NO: 567 - protein, 1157 aa, Ricinus communis
MHYVEKKRLANQKTTSVPQCDVINLEDDPPQSHVIAADIPVIILDSDEEDNGYQKPSHMYSKNSSSEPAHKLSVTVSAVKDCHEVRASWDETRSAPANNDFLVDKRKNTDTKNDAQVKDTEKVKASRDFVGGSLAECNIHANESPYPGMKTDVQVGDSENVKNSASVIVDLLGKCKIQVDSNSYACMDNDIVIKEDSHQDDIEDDGLVTIDTDVNNFENDRSQGHVTAADIQVIIINSDEEDSGYQRHSYLYENGTLSGPAHKLPVKDLTVTDCQGVKDPKDEARHSPANYCFQVNKNEYTDTKNDIQVEDNENVKASKCDVGGSLAECNIRVDEIPHSGMESIVQVRNSKKVKDPCDVIGDSHGKCSIFADVNSYTSMKSTAAIKKENHQIGVEDDAIVENETENDIQIKDNKRDKASRITIGNSPTKCSTQVLYATMENHMVIKEDIHQINAKDNGLAKIDTEGDIQDMDSKEFKASRDTVEGSLDKCNIQVDKRPYAVMKISMAIKEDSQHISVEDNVLSKIDTEDDIQDTVGKRVKALSIKVDDSMYTDMENAMAIEEDNRQIDVEDDGLADIWKEMKFAIEYSKDFAVDPATYGCLEEDAEACDHSFVLKDDLGYVCRICGIIQRSIDTIFEFQYAKKRNMRTYAYEPKYTIGKEPIGGIPVGINSPDLMVTEIAAHPRHKKEMKPHQVEGFNFLCSNLVGDNPGGCILAHAPGSGKTFMIITFIQSFLAKYPNARPMVVLPKGILATWKKEFEKWQVENIPLHDFYTLKAENRSQQLDVLKRWVKERSILFLGYKQLSTIVCDSSKVAAECQDILLKVTLREMRRLMYFNPSQKFKPLFLKLKASRMIINRIMGRVQISRVRKHLKHGGDSAFFDSVEYTLQKDEDFKRKKAVIQDLRQMTSKVLHYYKGDFLDQFPGLVDFTVVLNLSARQKDEVQKLRKLDKFKRISLGSAVYMHPRLKDFSQVCFATREKGSNIDDRTIDALLGNLDVREGVKTKFFLNILRLCESAGEKLLVFSQYILPLKLLERLSAKVKGWSLGKELFMITGDSNTEQREICMEHFNDSPSAKVFFGSIKACGEGISLEDYLTCSRKELISKMWFEWNEHCGDQDFEVKTTDVNECGDMFFESPGLREDLNVLYKRKRRQRGTLK

SEQ ID NO: 568 - protein, 883 aa, Glycine max
MESADDVSASKRPLPTGFSPGPDGPKRLRLSSDSLPYPACDQIEPKTPKNPNVVDYSNPFAITDILDRLENGKFGSVTKDIEALIALKMQIMGPYFAKYPILVNQLLKVVTHHDEETPKLENQQVTGLTHQSVIDLEGEYTEKDVPAVPNTVVIIDSDEEDDRDKKSVIPFHEVVLPRKVAPSPALKVIGYHTYLGESNDLKIEINMADKGNNTRSNKGVYVGAQGEEEDKADTEDDGLQDIWKEMSMAIECSKDVSEDPEPEEEEEEDDNCDHSFVLKDDLGYVCRVCGVIDRKIETIFEFQYKVKRSTRTYASDSWNSKGKADVFGINVAEDDLVVTDIAAHPRHMKQMKPHQVEGFNFLVRNLAGDHPGGCILAHAPGSGKTFMIISFMQSFLGKYPNARPLVVLPKGILSTWKKEFQTWQVEDIPLYDLYTVKADSRSQQLEVLKQWMEQKSILFLGYKQFSSIVCDNGTNNTSLSCQEILLKIPTILILDEGHNPRNENTDMVQSLAKVQTARKVVLSGTLYQNHVREVFNILNLVRPKFLKMETSRPIVRRIHSRVHIPGVRSFYDLVENTLQKDTDFKRKIAVIQDLREMTSKVLHYYKGDFLDELPGLVDFTVVLTLSPRQKPEIQKLKKLSRRKFKINSVGSAVYLHPKLKPLAENCGENSTSDNIMDDLIEKLDMRDGVKSKFYYNMLNLCESAGEKLLVFSQYLLPLKYLERLTMKWKGWSLGREIFVISGESSSEQREWSMEKFNNSPDARVFFGSIKACGEGISLVGASRIIILDVHLNPSVTRQAIGRAFRPGQMKKVFVYRLVSADSPEEEDHNTCFKKELISKMWFEWNEYCGDRAFEVEAVEVKECGDLFLESPLLGEDVKALYKR

SEQ ID NO: 569 - protein, 950 aa, Zea mays
MSQSPGGREGIYYSRQRKPSERNGSVFTPIAAMYPSGHALPDANRNHSLVFGGTSKDWDNIRQFIASLERASENSSAIASKTGGGKSTNHSVEPAEQKGKGDIIVLDSDDEDGDGNSPEHNKLASEMNKELGTSVLASNIAERMATNGSQTFETVHAYGGSKNTQIVPYGQGSALVNQFPLQTSWQPSIQFERVVLTKRPEEQRMQDLVAATIAEKRAETQMFLSLPTERKRRRTDHSLLMLDSFVPKQRRRKGDTGLAPADLSLDLHQTATSQEPDIAIEEEEKRKNDGDGLEDYWKDFALAVESTKLDDVDEAAANEKEDNGKMEDIDCNHDIRIHEDLGHVCRVCGMIVRRADSIIDYQWKKASRRRMNGYGGNSKDADEIDCGTVKLSEDFIVADIAIHPRHAQAMKPHQVEGFNFLVKNLIGDKPGGCILAHAPGSGKTFLLISFIQSFMARYPSARPLVVLPKGILVIWKKEIQRWQVQDIPVYDFYSVKAEKRVEQLQILKSWEDKMGILFLGYKQFSTIVTDDGGSKVTAACRDRLLKVPNLLILDEGHTPRNKETDVLESLSRVETPRKVVLSGTLFQNHVEEVFNILNLVRPKFLRMESSRPIARRIMSQVEIFGRSSKGLADGAFTEAVEGTLLNDENFKRKVHVIRGLRELTRDVLHYYKGAILDELPGLVDFSVFLKLTPKQKDIVHKLEMHDRFKRSAVGSALYIHPCLSGLSEVNAENRAHTLRDDSVDSLMDSINVRDGVKANFFMNILSLANSAGEKVLAFSQYILPMTFFERLLVKKKGWHVGREIFMISGDTSQEDREAAVDRFNSSADAKVLFGSIRACGEGISIVGASRVVILDVHLNPSVTRQAIGRAFRPGQQKKVFVYRLVAADSDEVKVHETAFKKEVIQKLWFEWSEQCTTENFKLGQVDIDDSGDELLDTRAIRQDIKALYRR

SEQ ID NO: 570 - protein, 653 aa, Physcomitrella patens
MNEIDRAFCINTLTSWRTFCVQGKGEVNVEEVTESCEHVYEVKNDVGRACSQCGLIKVDIKDMTFMWRRPCSVRKAFVRGERLDNWNDSGDGVLEEDVRLVGMAQLEAHPSLENAMHPHQLEGFKFLSRNLVEEDSGGCMLAFAPGTGKSFLIISFIQSFMVQVPNARPMIVAPKSMLRPWMQEFKKWEVEEMLVLNLYEADDHVKMLKQWMATPSVLLVGYSQFINPSGEVGKYLTEGPGMIVMDEGHLARTEETKILKSLTRVHTRRRVLLSGTPFNNNFEEFYTTLELVRPNFMSRANAQMFPTLNTFQQIVDTKMNSKQPVLDGQLLKRSTNAGRKAFQDVIGEKFESGKYSNIAKALQQLRVLIEPFVAWHKGQILNSLPGITDLTIMLELTAQQLELVRKNKQNEVRDSLQKRAAAIYVHPILEPVADGVKRSQRDPRLKGDVDVKAGAKLRWVLDMVQQCNDAKEKLLIFSEYLYSLALIENMAVQRMKWSKGLQILRLDGSLPPQERERVQHKFNTDPEVRVLCASIKACGEGISLVGASRVILLEVLWNPSVPRQAISRAFRIGQQRKVVVYRLIAAGTYEEMNMHAAATRKEWLSRLLFDPTIPCDDPNSILWDVTKDCSDSFLAYKQSKLREGVRSIYQREF

SEQ ID NO: 571 - protein, 748 aa, Sorghum bicolor
MQDLVAASIAEKRAETQMFLSLPTEKKRKRSDLSLLMLDSFVPKQRRKSDTGLAAADLSLDLQQPAKSPEPEPEPDMAIEEEEKCKNESDGLEDYWKDFALAVESTKLDEVDEAANEKEDNGNMEDIDCNHDIRIHEDLGHVCRVCGMIVRRADSIIDYQWKKASRRKTNSYGGHSKDADEIDCGTVKLSEDFIIADVAIHPRHAQTMKPHQLEGFNFLVKNLIGDKPGGCILAHAPGSGKTFMLISFIQSFMARYPSARPLVVLPKGILGTWKKEIQRWQVQDIPLYDFYSVKAEKRVEQLQILKSWEDKMSILFLGYKQFATIVTDDGGSNVTAACRDRLLKVPNLLILDEGHTPRNRETDVLESLNRVETPRKVVLSGTLFQNHVEEVFNILNLVRPKFLRMESSRPIARRIMSQVEISGRGSKGFADSAFTEAVEGTLLNDENFKRKAHVIRGLRELTKDVLHYYKGDILDELPGLVDFSVFLKLTPKQKDIIRNKLESHDRFKRSAVGTALYIHPCLSQLSEVNAENRANTLRDDLVDSLLDSINVKDGVKANFFMNILSLANSAGEKVLAFSQYILPMKFFERLLVKMKGWHVGKEIFMISGDTSQEDREVAVDHFNNSADAKVLFGSIKACGEGISLVGASRVVILDVHLNPSVTRQAIGRAFRPGQQKKVFVYRLVAADSDEEKVHETAFKEVIPKLWFEWSEHCTTEDFKLGQVDIDDSGDELLDTKAIRQDIKALYRR

SEQ ID NO: 572 - protein, 872 aa, Oryza sativa
MDTPLEQKQKDSSAIIVLDSDDEDEAERCEQLASENNKQQAPSGPTSPCTTWIVSSAKDQVNGTLHVDGVQSTQIVPYGQNAPLINQSPLQTSWQPSIQYERVILQRRPEEQRVQDLVAASHAEKIAETQVFLTLPTLPNERKRRKSEPTTLVDGDGGTNLGKGKRKNHQNQAAVDSILDLQQTVVPLQQNDVPSQSYRTMIEEEKPVKESDGLEDLWKDFSLAAECTKLDTNEDMSNEKDVDDENEMDDDCNHDIRIHEDLGHVCRICGMIVRKAETIIDYQWKKASRTRTNYYESRSKDADDIDTGAVKVSEDFIVSDIAIHPRHAKQMRPHQLEGFSFLVKNLVGDKPGGCILAHAPGSGKTFMLISFIQSFLAKYPSARPLVVLPKGILGTWKREFQRWQVEDIPLYDFYSVKADKRTEQLEVLKSWEARMSILFLGYKQFSRIICGDGDGNIAAACRDRLLMVPNLLILDEGHTPRNRETDVLASLKRVQTPRKVVLSGTLFQNHVSEVFNILDLVRPKFLKMESSRPIARRIMSQVAISGIRSLKGVHDSAFTESVEDTLLNDDNFTRKSHVIRSLRELTKDVLHYYKGDILDELPGLVDFSVFLKLSTKQKEIVHKIEAYEKFKRSAVGTALYIHPCLSEISEGDAADRATNLTDATVDSLIESIIIKDGVKAKFFFNILSLANSAGEKLLAFSQYILPMKFLERLLVKRLGWHVGKEIFMISGDTSADDREVAMDQFNNSADAKVLFGSIKACGEGISLVGASRVIILDVHLNPSVTRQAIGRAFRPGQQKKVFVYRLVAADSPEVKFHETAFKKEVIPKLWFEWSELCTTEDFKLNQVDIDDSEDELLEANAIRQDIKALYRR

SEQ ID NO: 573 - protein, 984 aa, Brachypodium distachyon
MAAAGEDPQEPHSGDCERLPLHHHLLLSHLVVVSPSAPAVGSDLEFGLVEAGKGMYYRRKNRASDPISGLSLPAGSGVHSWGCGSVTKDMEDIYARNVQLINFLSTLHEPTRSSVPMVETNVKYCSIKQETKVTDCSVKQTEPILIPDSDDEDGSTAELAPEKNKELIPLGLAGTLTAHVTSKGKDQVNETRHYGYQNSQIVPYGQSAALINHHSLQTSWQPSIQYESVILQTRTEEERIKYLAAASHAEKMAETQVFPDLPRERKQRKLDPNSQVDGDAGTAPRKRKRKTGPDPAAVDLPSETYNPVEEEEPAEEDKPENKSDGLEDLWKDFSVAMESSKLNTFEELPDEKELGEKDVDNDCNHDIRIHEDLGHVCRVCGLIVRRADTIIDYQWKKASRSRSYFCGTRSKDADEIIIGDIRVSDDLLALDIAIHPRHKKQIRSHQLEGFHFLVKNLVSDKPGGCILAHAPGSGKTFMVISFIQSFLAKYPSGRPLVILPKGILGTWKKEFQQWQVEDIPLYDFYSVKAEKREDQLKILNSWQSKMSILFLGYKQFSTIICGDGGGTVAAACRDMLLMVPNLLILDEGHTPRNTATNVLESLSRVQTPRKVVLSGTLFQNHVGEVFNILNLVRPKFLRMESSRPIVRRIMSQVAISGTRVSKGVPDNVFTESVEETLLHDENFTRKAHIIRSLRELTNDVLHYYKGDILDELPGLVDFSVFLKLSPRQKEIVHKLEAYEKFKRSAVGTALYMHPCLSEMSEGDATDRANNLTDAAVDSMVQSINVRDGVKASFFINILRLASCAGEKLLAFSQYILPMKFLERLLVKTWGWHVGKEIFVISGDTSPEDRELAMDQFNNSADAKVLFGSIKACGEGISLVGASRVVVLDVHLNPSVTRQAIGRAFRPGQQKKVFVYRLVAADSAEESFHETAFKKEVIPKLWFEWSEQHCTTDDFKLNQTDIDVCGDELLDNQAMRQDIKALYRR

SEQ ID NO: 574 - protein, 859 aa, Populus trichocarpa
METPLNILPLKRAAPNESRFNGNKRMKQMKEKVTDYSDPFAIHGLLDRLDSGRYGSVTDDIRSLFNRKAQMIHTFLVMYPELANESRGRGMSFSEEKCNVIDLDDGDDDEGGGGNVAAGRMPVVVIDSDDEVESNENRMAGHFQGIVLPKPEGQFLTDLMFSDHAERRIHGEVVSLTGEPDITKDKGVYVGVEEDEVDTGIEDDGLGDIWKEMSFALESSKDVVENPQPDENMEEDEDYCDHSFVLKDDIGYVCRICGVIEKAIDTIIEIQFNKVKRNTRTYMSESRNAKDRDSNGMVGVDLFEEDLTLTDIPAHPRHMKQMKPHQVEGFNFLRNNLVADNPGGCILAHAPGSGKTFMIISFMQSFLAKYPHAKPLVVLPKGILSTWKKEFQIWQIEDIPLYDFYSVKADSRHQQLEVLKQWLEHKSILFLGYKQFSSIVCDDGKNQVSVTCQEILLRRPSILILDEGHTPRNENTDVLQSLAKVQTPRKVVLSGTLYQNHVKEVFNVLNLVRPKFLRMDTSRGIVKRILSKVNIPGARKQFKAGADAAFYDLVEHTMQKDQDFKRKVTVIRDLREMTSKVLHYYKGDFLDELPGLVDFTVVLNLSSKQKHEVQKLKKFAGKFKRSSVGSAVYLHPKLHSFSENSAVTDDMMDNLLETLDVRDGAKAKFFLNILSLCKSAGEKLLVFSQYLTPLKFLERLVMKVKGWILGKDIFVISGESSSDHREWSMDRFNNSIDAKVFFGSIKACGEGISLVGASRIIILDVHLNPSVTRQAIGRAFRPGQTKKVYAYRLVAADSPEEEDHTTCFRKEAIAKMWFEWNEYCGYQDFEVETVELDDSGDCFLESLLVRDDVRLLYKR

SEQ ID NO: 575 - protein, 903 aa, Vitis vinifera
MHSEPKQKRQKAGPNVVDYSDPFAIPNLLEGLDAGRFGSVTKEIEALCARRMQMLQPYYVMYPSLSYMCTDLGKKQGKKASKLVNREASHLAHEDVIDLEDDHVVDDALTATAVEDATLPVVIIDSDDEDCGDQKVSHPPQETAWPSFSYQEVVLRKPSVGLLANNPVVRDYVGSIAPKVEEGSLMGATEIRKDKDVYIGVGEKSLVANLEMKKVQGEYVGVEDDMETNEGNLRAKTEDDGLADMWQEFDLALQSSKDVAVDPGEDEKESKEECEHSFVLKDDIGSVCRICGVVNKSIETIIEYQYTKVKRSRTYMYEPRNTKDREPTDDPSDGLGFSEHNLTVTEIHAHPRHSMQMKPHQVEGFNFLVSNLVAENPGGCILAHAPGSGKTFMIISFMQSFLAKYPQARPLVVLPKGILATWKKEFLTWQVEDIPLYDFYSVKADSRPQQLEVLKQWVAEKSILFLGYKQFSSIVCGDGASKATIACQEILLKAPQILILDEGHTPRNENTDVLYSLAKVQTPRKVVLSGTLYQNHVKEVFNILNLVRPKFLKLESSRAVVKRIMSKVDIMGVRKQLKSNAADAFYDLVENTLQKDDNFRRKITVIQDLREMTSKVLHYYKGDFLDELPGLVDFTVLLNLSARQKKEVGNLNKFERKFKKNSVGSAVYLHPQLKYFAEKLAANESKTDEMTCQKKMDEILEQLDVRDGVKAKFFLNVLALCQSSGEKLLVFSQYLLPLRFLEKLTMKVKGWSPGKEIFAISGESSSEQREWSMERFNTSPDARVFFGSIKACGEGISLVGASRVLILDVHLNPSVTRQAIGRAFRPGQKKKVHVYKLVAADSPEEEDHNSCFKKELISKMWFEWNEYCGHHEFEAETVDVSDSGDLFLESPLLREDITVLYRR

SEQ ID NO: 576 - protein, 903 aa, Cucumis sativus
MDATIDFSHNSYATTNGLYYGKHKRLKLSSDGKDLSSTATFSAKKSNTLRQNKMNNSAKVIDYSDPFATNNLIDGLDCGHFGSVTKEIGALVSRKMQVLSPYIAKYPALSSMLFDLGRSRECKEAMNNQASQLVHNLIDLEDDSAIDVRSNNVEKSRLPILIIDSDEEDSKEQRVIHPFQEVVLPRPPGQSLFKDIAIVDHRTSRDRRASNGEEATPIGESGTINKDKGVYIGVEEDEDEVSGQANSEDDGLGDIWNDMQMALECSKDLDAAVDSSSNQPTTEDVDCEHSFLLKDDLGYVCRICGVIDRGIETIFEFQYNKGKKSTRTYISESRNKDSGNIVGVKISEDDLTVTEISAHPRHMKQMKPHQIEGFNFLISNLVSDNPGGCILAHAPGSGKTFMIISFMQSFLAKYPQARPLVVLPKGILATWKKEFQIWQVEDIPLYDFYSVKADNRAQQLTVLNQWVEHKSILFLGYKQFSTIVCDVETSAASTACQNILLQVPTILILDEGHTPRNENTDTLQTLAKVRTPRKVVLSGTLYQNHVKEVFNIVNLVRPKFMRSETSRPIIKRIMSRVDIPGARKQFKAGVDAAFYDLVEHTLQKDTDFRRKVSVIHDLREMTSKILHYYKGDFLDELPGLVDFTVVLNLTSKQKHEGEKVKKFNRKFKISSAGSAVYLHPKLNVFSVNAAVTDDKIDEVIDKMDVKDGVKTKFFLNLLNLCATTGEKLLVFSQYLLPLKFMERLVVQKKGWSPGRETFMISGETTPEQREWSMERFNNSPDARVFFGSIKACGEGISLVGASRIIILDVHLNPSVTRQAIGRAFRPGQTKKVFAYRLVAGDSPEEGDHSTCFKKELIAKMWFEWNEYCGYHDFEVETVDVKQCGDNFLETPLLGQDVKVLYRR

SEQ ID NO: 577 - protein, 815 aa, Arabidopsis lyrata
MFVFAKKLKSLPASKHERSEANQKSSSLRCHIQFLFIFLKFSSKVPTFNSLMEILHPDQATSNGFYKNVHKRKQNQVDDGLCSDSEAKRLKSSSKVIDYSNPFAISNMLEALDGGKFGSVTKELQEIADMRMDLIKRCIWLYPSLAYTEFEDEKTMLSLDNQQVVEGGVINLDDDDDDDDDVSNKAICVVPSSEIVVLDSDDEDNERQRSTYQFQSTLVQLQKNQGDVTPVTPQFTFEEVDLGRSKEMMPSVIKAIVEGQTSRDKVIAIENGVANEKGVYVGVEDDDIDNESEAADEDLGNIWNEMAMSIECSKDIAWETSHKQKADVVEDCEHSFILKDDMGYVCRVCGVIEKSILEIIDVQFTKAKRNTRTYASETRNKRFGESDAELKFSEEGLMIGGLAAHPTHADKMKPHQIEGFQFLCSNLVADDPGGCIMAHAPGSGKTFMIISFMQSFLAKYPQAKPLVVLPKGILSTWKKEFLRWQVEDIPLLDFYSARAENRAQQLAILRKWMEKKSILFLGYKQFSTIVCDDTSTDSLSCQEILLKVPSILILDEGHTPRNEDTNVLQSLAQVQTPRKVVLSGTLYQNHVKEVFNILNLVRPKFLKLDTSKSIVKRILSYAPISDVRSHMGNNSDVSSAFNEIVEYTLQKSEDFTMKINVIQDLREMTKKVLHYYKGDFLDELPGLADFTVVLNLSPRQLNEVKKLRREKRKFKVSAVGSAIYLHREAETIGRAFRPGQTKKVHAYRLIAGSSPEEEDHNTCFKKEVISKMWFEWNEYCGYRNFEVETIDVDDADDMFLESPTLREDIRVLYKR

SEQ ID NO: 578 - protein, 163 aa, Arabidopsis thaliana
MQSSMTMELRPSGDSGSSDVDAEISDGFSPLDTSHRDVADEGSLLRRAEMYQDYMKQVPIPTNRGSLIPFTSWVGLSISMKQLYGQPLHYLTNVLLQRWDQSRFGTDSEEQRLDSIIHPTKAEATIWLVEEIHRLTPSHLHMALLWRSDPMYHSFIDPIFPEK

SEQ ID NO: 579 - protein, 175 aa, Ricinus communis
MKRTMPWNEQIDVISSDESTSSDGDMETDVVLDGHKPSPRITISQSLKEITSEDVLIRRAEMYQDYMRQLPIPVHHGSVIPFSSWVGLGKSIKQLYGQPLHYLTNILLKQWDQLRFDNGDEQKSLDIVIHPCKAEASVWLVEEIHRCTSSPHYVAKLWLLDPMHHAFVDSIFPPL

SEQ ID NO: 580 - protein, 165 aa, Glycine max
MKRSFPWENQIDVSSSSSPNSLRPNPLTIPNSPIDTKSQDALIRRAEMYQDYMKQIPIPNHRGTMIPFTSWMGLGRSMKQIYGQPLHYLTNILLKQWDQLRIGSEDEYKPLDNIVHPHKAEATIWLIEEIHRQTSSHFHLASLWKVDPMYNGFVDSIFPTLEHTS

SEQ ID NO: 581 - protein, 218 aa, Zea mays
MKRAAPSQEPLDVSSGDSSGSDSDQLGGKDKGGSASKAAAGAEDVKRVVLHKESQDVSSDDDLSSDSDDDAGKGNAWNAFGLPNSSKAASTAEGALIRRAEMYQQYMKRIPVPAYRDSVIPFTSWLGLAGSLKQLYEQPLHYLTNVLLKKWDQQRIGSDDEHRRLDAIIHPARAETLVWATEEVHRLTTSGQHLASLWASDPMYHAHVDPVFASVKLE

SEQ ID NO: 582 - protein, 179 aa, Medicago truncatula
MKRPFPWDEDEIDVSDSSSSDDSPNETPNVATVLPSIHIHIPLPNPSSDVNSLDALTRRAAMYQDYMKHIPIPSSRGSLIPFTSWMGLGRSIKQLYGQPLHYLTNILLKQWDQLRIGSEDEYTPLDDIIHPRKAESTIWLMEEIHRQTSSHFHIADLWKKDPMYHGFIDSIFPKLEDTS

SEQ ID NO: 583 - protein, 173 aa, Oryza sativa
MKRAAPWEEPLEVSSDDSLSSDSDDEAGKGKGDNAFGLPNSTKAAAPDGALIRKAEMYQEYMKHIPVPAHRGSVIPCTTWLGLGRSVKQLYKQPLHYLTNVLLKQWDQQRVGSDDEHRPLDAIIHPVKAEALIWITEEVHRLTTSSQHLASLWASAPMYHAYIDPVFPPIKLQ

SEQ ID NO: 584 - protein, 175 aa, Populus trichocarpa
MKRTIPWTDPVDVISSDESSSSDSDIELNDGLDGQRLSNYVTIDQPIKETTSEGVLIRRAEMYQDYMRHIPIPVQRGSAIPFSSWAGLGKSIKQLYQQPLHYLTNILLNKWDQQRIGSEDEHTPLDIMIHPCKAEATIWLVEEVHRRTSSHHHVAKIWQSDPMHHAFVDSIFPKL

SEQ ID NO: 585 - protein, 137 aa, Vitis vinifera
MDITIDQPARQEPFEDVVIRRAEMYQEYMKQIPIPARRGSLIPFDTWMGLAKSIKQLYGQPLHYLTNILVKQWDQLRIGSKDENRSLDSIIHPSKAEASIWLIEEVHRQTTSPHHMAKLWLSDPMHYAFVDSIFPQI

SEQ ID NO: 586 - protein, 174 aa, Cucumis sativus
MKRPMPWNEQVDIISSGESSSSDSEAAIQNDGYEFKPSLDDFKIPAKEMTSEGMLMKRAEMYQEYMKQIQIPAQRGSVIPFTTWMGLGKSIKQLYGQPLHYLTNILLKQWDQLRLGSADEYKPLDTVIHPSKAEATVWLVEEIHRRTSSHHHVAKLWLSDPMHQAYVDSIFPQL

SEQ ID NO: 587 - protein, 167 aa, Arabidopsis lyrata
MQSSMTLELRPSADSGSSDVDAEISDGFSPLDNSHRDVADEGSLLRRAEMYQEYMKQVPIPTNRGSLIPFTSWVGLSISMKQLYGQPLHYLTNVLLQRWDQSRFGTDSEEQSLDSIFHPSKAEATIWLVEEIHRITSSHLHIASLWGSDPMYHSFIDPIFPKIETSS

SEQ ID NO: 588 - protein, 710 aa, Arabidopsis thaliana
MADMRRRNGSGGSSNHERNEQILFPKPETLDFDLPCDTSFPQQIGDNAASSSGSNVKSLLIEMGFCPTLVQKAIDENGQDDFELLLEILTKSTETEPPGPSFHGLMEPKPEPDIEYETDRIRIALLTMKFPENLVDFALDRLGKDTPIDEMVDFIVAAQLAEKYAEESEDSLDGAEINEEDEDVTPVTARGPEVPNEQLFETMDKTLRLLEMGFSNDEISMAIEKIGTKGQISVLAESIVTGEFPAECHDDLEDIEKKVSAAAPAVNRTCLSKSWRFVGVGAQKEDGGGGSSSGTANIKPDPGIESFPFPATDNVGETSRGKRPKDEDENAYPEEYTGYDDRGKRLRPEDMGDSSSFMETPWMQDEWKDNTYEFPSVMQPRLSQSLGPKVARRPYFFYGQLGELSPSWWSKISGFLFGIHPEHVDTRLCSALRRTEGYLHNLPTVNRFNTLPNPRLTIQDAMPHMRSWWPQWDIRKHFNSGTCSNMKDATLLCERIGRRIAECKGKPTQQDQTLILRHCHTSNLIWIAPNILSPLEPEHLECIMGYPMNHTNIGGGRLAERLKLFDYCFQTDTLGYHLSVLKSMFPQGLTVLSLFSGIGGAEIALDRLGIHLKGVVSVESCGLSRNILKRWWQTSGQTGELVQIEEIKSLTAKRLETLMQRFGGFDFVICQNPSTPLDLSKEISNSEACEFDYTLFNEFARVTKRVRDMM

SEQ ID NO: 589 - protein, 678 aa, Ricinus communis
MQLISFSNSNAVLSWLTAEASGHDKMRKVHNGETSSNQKTTVPKPEMLDFDFPSDFIYSSQLGETAASSSASDVRSFLTGMGFLPSLVDKVIQENGEDNVDLLLEILMECSDPQKSNSQSSDSLDTLFNDKDASNPPEYSKFGQPKEEPDVFGFDDSKRASLLHMNFSAEEVDFAMEKLGTDAPVDEIVDFITAAQVAANFDEERDDELEHDVEQNKYCSRHSRMNPSHVARGGESFNMEIRDEQRRDSYGRKKPENLSQEAVSRSSNLNLEEIHRGKRPKQEYTEGYSNTQDEHFGFEENYEEEGPKPEYTADSSFSFESAWVEEKVDTEITGFRIPREPKFKSCKSVDRMVAKPPYFLYGNVATVSLDTWGKISQFLYAVEPEFVNTQFFSALSRKEGYVHNLPTENRFHILPKPPMSILDAMPHIKKWWPSWDTRKQLSFINYETNGLSQLCDRLGRMLTDSRGLISSQQKRDILHHCHKLNLVWVGLHKVRPIEPEHLELILGYPLNHTQTTEGSLTERLHALRYSFQIDTLGYHLSVLKSMFPEGITVLSLFSGIGGAEVALHRLGIHMKGVVSVETSETKRKILRMWWRNSGQTGELEQIEDIQKLTTKKIDRLIERFGGFDFVICQSPCTCASGNPKMEQRADARSALDFSLFCEFVRVLQRVRTQVQRKR

SEQ ID NO: 590 - protein, 694 aa, Glycine max
MAGNPNRREGKTVMVPKTENLDYELPPYTSFSGDVGDNVASSSGGKLRAFFIGMGFLPCLVDKVIEENGEENSDILLEALLRYSALQKSNSQSSVSLDSLFDDKDPPEISNVNQAKEEPDELSGVVDDTRGSLLMMNFSVEEVEFAIHKLGDEASIPELVDFIFALQIAKKLKKEPDDITFTYYGRGNEVTNEKLFGIMAKTLQLFEMGFSENEVSSAIDKLGSEAPISELANFIFAEQNGIDYVMEYKFPTTSTYSVGIKEEPEMDLYGTAEVKVEGFSHEPPQSSQVNLEETYNDDMVKEEEGIDAFPSNVSDQYLDVVENGRGKRPKYEHDDDPVNCLEPSWVEERVDAVVAEMSRHPKPNPSRCLSSVAAKPPFFLFGNVSNISYDSWTKMSQFLYGIEPEFANAQSFSAMDRIEGYIHNLPVENRFHILPKPPMTIEDAMPQTKKWWPPWDSRKLLSSIYCETNGIAQTCDRLGNFLADSGGVLTSEQQKDILRYCRRLNLVWIGKFKLGPVEPEQLELILGYPLNHTRATEGNVAERLKSLKYCFQTDTLGYHLSVLRPIFPHGLTMLSLFSGLGGAEIALHRLAIKIKAVVSVETSETKRKILEKWWRQSGQTGTLVQIEDIQKLTSKKLEGLISKFGGFDLVIYQNPCSYSSSRLQAGVGLSALDFSVFCECVRVLQRVRGMYQRK

SEQ ID NO: 591 - protein, 659 aa, Zea mays
MVKVEDQAEDGGADADARGLRESALDPLPVSVHASLKEEEGQPSSSSGKLRSQFIGMGFSSKLVDKVLQRHGDDDSNTILESLLSYSDLQQSGSESSDSFGSFFDNDNEENNSPSESRKGIYQDIKPELDSFSEKWSFLLRTMNFSQQEVDLAFKQLGDEAPLEQLVDFIVSAQSGVPSGGLQTGDATNEGKTELLYGVMEKTLSLLQMGFTEEEVSSAIDNFDQRATVQELADSILARRIANSIEQKEIKVESDFLDEAETDYSSYQPSYSDVSYYDDDNNNTRVKRAKHIFIDDIGASSSHLGDPWSMGQRAGTNDMSVKVELEAMTPGRRANVQGDLAKPPFFLYGNVVEVPKDTWHQLKQFLYNVEPEFVNSQSFSALTRREGYIHNLPVEKRSVVVPKSPMTIEEALPFTRQWWPSWDTRKHISVITTEAAGIEQTCERLGGMVRESRGVLSQARQMQIIHQCRVSNLIWVGRDRLGPLEPRQVEKILGYPYNHTNLFELNQPDRLAAMKYAFQTDTLSYLLSVLKGKYQDGIRVLSIYSGIGGAEVALHRLGIPLKCVISVEESEVNRKILRRWWLKTEQTGVLRQHAGIWKLKTHVIEDLVKEFGGFDLIIGGNYTSCKGGTTVNTTMGMDSNRFYEYNRVVKRVRTAVGLS

SEQ ID NO: 592 - protein, 1032 aa, Medicago truncatula
MTGTSNGRGGKNPVFPKTEDFDYELSPYTALSRDFRETAASSSGSKVRGFFIGMGFLPGLVDKVIEENGTLCVSEENSDALLEILLRCSTNGDSSDSLEGSLNTNEHRSIPNFFPNAHSKEALQISNLESSDSLDSLFDDKDSPEVSMINQPKEEVDEIFEDIEDSRGTLLMMNFSAEEVEFAIRKLGNKAPVPELVDFIFAAQIAKKMKKEEAEEDDIKCYVREKEISNEQLFGIMAKTLQLFEMGFSENEISSAVDKLGPDVPISELANFIFAEQNGIEYVMEYKYPSGPSYSWIKEEEQSDMYGTAEVKVEDFSHEPSQSRQVNLGETGTGERVKEEDYIDEFPDDVKPGFMENDRNKRPKYEYDDNSNSSLDPYWVEEMVDTVVATMSRRNKSTPSRSLSSVAAKPPFFLFGNVSNITYDSWKKMSQFLYCIEPEFVNTELFSALNRIEGYIHNLPTENRFQILPKPPMTIEDAIPRTKKWWPPWDSRKKLNCNYCETGGITQLCDRLGRALANSGGILTSQQQKDILRYCRGLNLVWTGKYKLGPIEPEHLDHILGYPLNHTRTDECDLTERLQLLKHSFQTDTLGYHLSVLKPIFPTGVTLLSIFSGIGGAEVALHRLGIKIKALVSVETSATKRKILEKWWRSSGQSGTLVQIEEIQKLTSKKFENLINNFGVFDLVIYQNPCSQPIVRPHQVGGLSAVEFSAFCESVRILQRVRALCERREMTVSLPVLSEVIWKVLVGLVKQGDDSFTSSVVRSDMEGSMVDRCPRYDIKKVGVLRWGYCRREEGKNANESGEATAKSAKGVIVIEGLITSLALALGLESELANLVALEDCTQLDLHSCMNQKFVQVKGKIQFYLMIKNELVRSIVLPNREQINVRNENNWLFDLEAPESPLAAHPAAAYRADDAHEGGGTDDEYDRQERLSPAHSYPHLTPSPDRHIPPHTQAPDYTPHLPHICTLVSTSYTSQSSVEYELNALRPEVANLRATQQERSDRETERDHQMRVNNHMIRQMFTWITRHDMPPAE

SEQ ID NO: 593 - protein, 576 aa, Sorghum bicolor
MADRVGGSDDGDKSEWNSDGEVARSLDGAGSPIAPSRNKLKDAPGPSLLVNGAGPSASLVEDFVGMGLIKGNGDGGAESLLELLLAYKAIGNDPSLDKSSASVCGPRTICDDKDILANWDAHDASTSSDRDHASDDSGDEDFLQGLSQKDEKIESLVRMGFPKDEAEMAIVRCGQDAPMSVLIDLIYSSEASEDGYYGNFSGHEDDSFGGRKEKRKRSEDAEQGSSHDEPMPLPNPMVGFNLPNVSLRSVDRSLPSKAIGPPFFYYENVAIAPKGVWTTISQFLYDIQPEFVDSRFLCAAARKRGYVHNLPIENRSPLLPLPPKTIFEAFPHTKKWWPSWDPRKQFNCLLTSMAKPKLTEQIHHALAKCKDPPPRRVQKYVLETCRTANLVWVGLNKVAHLEPDEMEFLLGFPKDHTRGIGRPERFKSLGNSFHVDTVAYHLSALRDMFPHGMNVLSLFSGIGGAEVALHRLDIRMKTVVSVEISETNRFVLRTWWNQTQTGTLIEITDVQSLTTERLESCIRRIGGFDLVIGGSPCNNLAGRNRFHRDGLEGEQSSLFYHYYRILDTVKSIMGRM

SEQ ID NO: 594 - protein, 680 aa, Oryza sativa
MVKVEDDVEGSGINASVGDLRDAAVNPQPALLRATVKEEEGQPSSSSSHVRSQFIGMGFSPMLVDRVLQKHGDRDSDTILEALLSQSALQKSGSESGSLGDLFDSDNEENSSHFAPRKEVIQDIKVEADSSSEKRSYLLSTMNFSQREVDLALNQLGEEASLEQLVDFIVTGQVSGCSGGNENGDASNEVKDESLFGVMDKTLHLLQMGFTEEEVSSVIDKAGPEATVLELADTIFARRIASSIEQKEVKVEPDFLDETETSYSAYHPSNSGLRYYDDDHDNIRIKRAKHMFIDDSAGSSSRAGNQPNLDPWLKDHRATTSDGSVKEEFDAMTPGIRRNVRSDVANPPYFLYGNVVEIPKATWRQLSEFLYNVEPEFVNSQFFSALSRKEGYIHNLPTEGRRNLVPRSPMTIEEAFPFTRQCWPSWDTRKQLNSVATEVAGIEQLCERLGKMVRDSGGYLSQEKKTHIMHQCKLANLIWVGPDRLSPLDPQQVERILGYPRKHTNLFGLNPQDRIEAMRYSFQTDTLGYLLSVLKDLYPDGLRVLSIYSGIGGAAIALHRLGIPLQCVVSVDQSDTNRKILRRWWSNTEQKGQLRQINTIWKLKINVLEDLVKEFGGFDIIIGGNFSSCKGGTTVNSSMGMDSNQFFEYVRVVQRVKHIMGRLQVRAHESARHRHRSPSN

SEQ ID NO: 595 - protein, 660 aa, Brachypodium distachyon
MVKTEDQDEDEGVSASVGALRDGTVDPQPDTAHAGVKAEEDGQPSSSSSYSKFIGMGFPPTLVDKMLQKHGDKDFNAILESLLFHSSLTKSGSESSSSLGSLFDSDSEENISRLGSMKEPHEEIKPEPDSFSERRSYLLSAMNFSQQEVDWAFNQLGEEAPLDQLVDTIVTAQVAGFTGGNENVDATTEGKAESLFGVMEKTLHLLQMGFTEEEVSGAIDSSGQEATVQELADSIFARRIDNSIKQTEVKIESDFLGGTENQHSTCHQRLRYYDDEDDKIGVKRAKSIFTDNSSGASSSRPGNQPSLTPWLSGCTGSVSNGYVKEEFDAMASGPRPDVRPEIAKPPYFLYGNVVDIPKGTWHQLSDFLFNVEPEFLNSQYFSAVMRREGYLHNLPMETRHIVVPKSPMTIEDALPFTRQWWPSWDTRKHIGVVTLDVAEIEQMCEKLGKIMTDSRGVLSHEKQAHIMQQCKMSNLIWIGKDRLSPLEPHQLEHILGYPRNHTEQFELNTPDRLAAMKYTFQTDVLAYLLSVLKSKYPNGLRLLSIYSGLGGAEVALDRLGIPIKCIVSVEESDVNRKILRKWWRRTNQAGELRQFVGIWKLKTIVLEDLVKEFGGFDLIIGGNYSSCRGGRTINATMGMDSNKFYEYARVVKIVRALHNS

SEQ ID NO: 596 - protein, 661 aa, Populus trichocarpa
MGYSPSLVNRVIEENGEDNVDLLLEILMECSGLQKPNSQSSDSLDCLFDDRGESSPPKYSTVTGVKEEPDVFDEVYDDKRVSLLKMNFPAKEVELAMDKLGENAPINEIIDFIIAAQIANNLDRETEDMPDIDAENKEDVNDETLYGTMDKTLCLLNMGFSENEVSLAIDKFGSEVPVTELANAICAHQLGETYVIKKKYSENSTASCSSAAEDSRSFGVETENNTRHHSFSWVKSETEDCRRDAILQSRDMNTKETRKGKRPRQEHIEGYQEAQPRHDSLEENCAGEQPKQEYDYGSSSYFEHEWVEEKVNSDTTTFGMPKPFKCNPCKILDQIAAKPPYFFYGNVATASSDTWGKISQFLYGIEPEFVDTQFFSALSRREGYIHNLPTENRSHILPKPPITLEDLMPSTKKWWPSWDARKKMSCRNFDSSGSSQLCDMLGRMLDDSRGLLSAEQQRDLLRHCQALNLMWVGPNKLSPLESAHLEKILGYPLNHTLIADYPLTERMYSLRYSFQTDTLGYHLSVLKSIFPQGITVLSLFSGIGGAEITLHRLGIHLKGVVSVETSETNRRVLKRWWYSSGQTGRLEQIEDIRKLTSSTVERLVENFVCFDFVICQNSFTRPSKIPGVGSGLESQHFFDFTLFNEFVRVLQRVRSAIERKR

SEQ ID NO: 597 - protein, 712 aa, Vitis vinifera
MGEIADYSDSKSSSETVGERGTMIKVEPLELNLPTENMCARHIGHNGASSSGSKLRSSFIGMGFLPSLVDKVIEEKGEDDVDLLLETLCANAALQKSISESSDSLDSFLNDEDTNNPPKFSAGFHPKEEPDVSSGVNDDKRATLVMMKFSVDEVEFAMDKLGEGAPVNELVDFIIAAQIAGSSKMDADDPTYGNEERKEDCNNEALFGTMDKTLRLLEMGFSENEISSAIEKFGSEVPISELADSIFAGQIAEKDKHSSATFRLNHSHTGNDYRSFGKGMEDGLKRRSSGTFMVKTEEYSPEAVSQLRAVDIGDDHKGKRPKQESLDDSSAYIGPTWLEGRKGDHKFSSCRMPLPRRDLNQVAGQLNKFGMSSISKPMPCKSLDQLVAKPPYFFYGNVTNVSHDSWNKISQFLYALEPEFVNTQFFSALNRKEGYIHNLPSENRFHILPKPPMTIEEVIPYTKKWWPSWDTRKQLSCISSETSGISQLCDRLGKILVDSRGLLSFEQQRDILHHCRTLNLVWVGQCKLSPIEPEHLERILGYPLNHTRVPEYSLIERLQSLRHCFQIDTLGYHLSVLKSMFPKGLTMLSLFSGIGGAELTLHQLGIHLKGVVSVEISETKRNILKKWWHNTGQTGELVQIDDIQKLASSKLESLIEKFGGFDFVICQNPCTYSSRNSKMVADGDSLTGFDFSLFCEFVRVLHRVRSTMERRR

SEQ ID NO: 598 - protein, 724 aa, Cucumis sativus
MASNKPIVPKEEVFDFRLPPDRMYSRHVGDSGASSSGSNVRTFFIDMGFLPSLVDSVIEKNEQKSIPQSSDSLEGLQSGKMGSNPPHVSTVCHKQVQAAQTSKSESSDSLDSLFDDKDAHNEISSVIPKEEADDYYHISDTNKASLLVMNFSADEVDFAIDKLGGDAPLNELVDFIIAAQIAIKLEKETDDAFCRNELKKEENDETLFVTMEKTLRLLEMGFSENEVSLAIEKFGSETQVSELADSIVTGRIASDYPGDVKCSPSSFGIGGLYTREDYVTKVKAEESSSAVGPLPRNVNIEAIQKGKRPKEENMDDLLNPTTRLNKHKGKRPKQEYADDLGSLYGPGWVESKVNPDITSFDIPPSSRLNLSRSLDKLVAKPPCPPLKSNPSRALEKVVTKPPFFLYGNVLDISRDSWAKVSKFLYAVEPEFVDTRSFSALSRTEGYVHNLPCENRFHIIPLPPMTIQDATRTKKWWPSWDTRKYLSCINSETRGVPQLCDRLTKTLTDSGGHPSSHEERDILHHCIALNLIWVSQFKLAPVEPEQLECVLGYPVNHTQDAESSSIERLQYLKYCFQTDALGYHLSVLKSMFPEGLVVLSIFSGIGGAEIALHRLGIHLKVVVSVESSAAKRRILKKWWHSSGQTGELEQIEDIQKLTSIKINNWITKYGGFDLVICQNPCSRCLSSSKLNQSGDAEGIASFDFSIFYEFVRVLQSVRNTMHRKK

SEQ ID NO: 599 - protein, 743 aa, Arabidopsis lyrata
MVWNLATLGLLLSFCLESLFQFVFFLSGILQGDLRRRNGNGGSSNHERNEQILFPKPETLDYELPCDTSYPHQIGDNAASSSGSNVKSLLIEMGFCPTLVQKAIDENGEDDIEFLLEILTKSTVTEQPGTSFHGLMEPKPEPDIEYETDGRRIALLTMQFPENLVDFALDRLGKDAPIDEMVDFIVAAQLAEKYAEESEDSLDGAEINEEDEDVTPVTARGPEVPNEQLFETMDKTLHLLEMGFSNDEISMAIEKIGTEGQISVLAESIVTGEFPAVCHDDLEDIEKKVSAAAPAANRACLSKSWRFVGVGAQKEDGCGGSSSGTANIKPDPGIDSFPFPATANVGETSKGKRPKDEDENAYPEEYTDHDDRGKRLRPEYMGDSSSFMETPWMQDEWKDNTYEFPSVMQPRLSQSLGPNVAKRPYFFYGQLGELSPSWWSKISGFLFGIHPEHVDTRLCSALHRTEGYLHNLPTVNRFNILPKPRLTIQDAMPQMKSWWPQWDIRKHFNSGTCSNRKDVTLLCERIGRRIAECRGKPTQQDQTLILRHCHTSNLIWIAPNILSPVEPEHLECIMGYPTNHTNIGGGRLAERLKLFDYCFQTDTLGYHFSVLKSMFPEGLTVLSLFSGIGGAEIALDRLGIHLKGVVSVESCGLSRNILKRWWQTSGQTGELVQIEEIKSLTTKKLETLVQRFGGFDFVICQNPSTPLDLSKEISNSEACEFDYTLFNEFARVTKRVRDMMELS

SEQ ID NO: 600 - protein, 626 aa, Arabidopsis thaliana
MVIWNNDDDDFLEIDNFQSSPRSSPIHAMQCRVENLAGVAVTTSSLSSPTETTDLVQMGFSDEVFATLFDMGFPVEMISRAIKETGPNVETSVIIDTISKYSSDCEAGSSKSKAIDHFLAMGFDEEKVVKAIQEHGEDNMEAIANALLSCPEAKKLPAAVEEEDGIDWSSSDDDTNYTDMLNSDDEKDPNSNENGSKIRSLVKMGFSELEASLAVERCGENVDIAELTDFLCAAQMAREFSEFYTEHEEQKPRHNIKKRRFESKGEPRSSVDDEPIRLPNPMIGFGVPNEPGLITHRSLPELARGPPFFYYENVALTPKGVWETISRHLFEIPPEFVDSKYFCVAARKRGYIHNLPINNRFQIQPPPKYTIHDAFPLSKRWWPEWDKRTKLNCILTCTGSAQLTNRIRVALEPYNEEPEPPKHVQRYVIDQCKKWNLVWVGKNKAAPLEPDEMESILGFPKNHTRGGGMSRTERFKSLGNSFQVDTVAYHLSVLKPIFPHGINVLSLFTGIGGGEVALHRLQIKMKLVVSVEISKVNRNILKDFWEQTNQTGELIEFSDIQHLTNDTIEGLMEKYGGFDLVIGGSPCNNLAGGNRVSRVGLEGDQSSLFFEYCRILEVVRARMRGS

SEQ ID NO: 601 - protein, 686 aa, Ricinus communis
MGVIVYCFRITTCKPVYMEHKTLYLEILGIAVASKEMDGDSFCGEGDNFDWDSEDEREIENFGLTNSSCLAVPAVEATARSVEKCLMGFSCILRHASSSVRSSGTKVMDHFVGMGFPEKMVAEAIQENGEENADLILETLLKFSTISSPSSSGSKLIDHFVGMGFDVEMVDRAIQENGEEKTDSILETLLTYSVIEKSHQEQPHVDSDHWSSEYEGSFLNDFSDIDSSENEENGKSQPVEGNTLRFLARMGYTTDEASIALERCGPDANIAELTDFICAAQMAKAADASFPEEKPKIRHFDDDYPKNKKRNYAEYDMWKKKKQMKLDKKLLNGDDELIRLPNPMLGFGVPTDPAIVTHRKLPEAALGPPFFYYENVALAPKGVWQTISRFLYDVEPEFVDSKYFCAAARKRGYVHNLPIQNRYPLLPLPPNNIHEALPLTKRWWPSWDTRTKLNCLQTCVASAKLTDRIRKALEDYEGEPPLSIRKYVLDECRKWNLLWVGRNKLAPLEPDEVEMLLGFPRNHTRGGGISRTDRYKSLGNSFQVDTVAYHLSVLKDMFPEGISLLSLFSGIGGAEVALHRLGIRLKRVVSVEISEVNRNIMRCWWEQTNQTGTLIDIADVHDLNADRLEQLMSSFGGFDLVVGGSPCNNLAGSNRHHRDGLEGKESSLFFDYCRILDLVKCIMTRN

SEQ ID NO: 602 - protein, 590 aa, Glycine max
MGGDDSGLESDNFDWNTEDELEIQNYNSSSSCLTLPNGDAVTGSGEASSSAVLANSKVLDHFVSMGFSREMVSKVIQEYGEENEDKLLEELLTYKALESSSRPQQRIEPDPCSSENAGSSWDDFSDTDIFSDDEEIAKTMSENDDTLRSLVKMGYKQVEALIAIERLGPNASLEELVDFIGVAQMAKAEDALLPPQEKLQYNDYAKSNKRRLYDYEVLGRKKPRGCEKKILNEDDEDAEALHLPNPMIGFGVPTESSFITHRRLPEDAIGPPYFYYENVALAPKGVWQTISRFLYDVEPEFVDSKFFCAAARKRGYIHNLPIQNRFPLLPLPPRTIHEAFPLTKKWWPSWDIRTKLNCLQTCIGSAKLTERIRKAVEIYDEDPPESVQKYVLHQCRKWNLVWVGRNKVAPLEPDEVETLLGFPRNHTRGGGISRTDRYKSLGNSFQVDTVAYHLSVLKEMYPNGINLLSLFSGIGGAEVALHRLGIPLKNVVSVEKSEVNRNIVRSWWEQTNQKGNLYDMDDVRELDGDRLEQLMSTFGGFDLIVGGSPCNNLAGSNRVSRDGLEGKESSLFFDYFRILDLVKNMSAKYR

SEQ ID NO: 603 - protein, 603 aa, Zea mays
MVHWVSDSDGSDNFEWDSDGNGEQTVSFNAAGAGSSALAATNTDAPGPSTRVANGNGKAGRSASLVQKYVDMGFSEEIVLKAMKDNGDNGADSLVELLLTYQELGNDLKVDNDFASSCAPKTADDSDDDDTLEIWDDEDAGGRSTRVANSVDDSDDEDFLHEMSRKDEKVDSLVKMGFPEDEAALAITRCGPDASISVLVDSIYASQTAGDGYCGNLSDYEDNSYGGRSTGNKKKRKRYGGQAQGSRGPLDGSCDEPMPLPHPMVGFNLPDQWSRRVDRSLPAQAIGPPYFYYENVALAPKGVWTTISRFLYDIQPEFVDSKYFCAAARKRGYIHNLPLENRSPLLPIPPKTISEAFPRTKRWWPSWDPRRQFNCLQTCVSSAKLLERIRVALTNSSDPPPPRVQKYVLEECRKWNLAWVGLNKVAPLEPDEMEFLLGFPKDHTRGISRTERYRSLGNSFQVDTVAYHLSVLKDLFPQGMNVLSLFSGIGGAEVALHRLGIRMNTVISVEKSEVNRTILKSWWDQTQTGTLIEITDVQTLSSERIEAYIRRIGGFDLVIGGSPCNNLTGSNRHHRDGLEGEHSALFHHYFRILHAVKSIMERL

SEQ ID NO: 604 - protein, 588 aa, Medicago truncatula
MGDYSGLDSDIDWNTDDELEIESFQPSCSTVVPSGQTITAGSVEPSSFAGPSNTKVFDHFISMGFPGEVVSKVIQEHGEENEEKLLNEILTYSVLESSPQQQQPAELDPTSSECAGSSWEDLSEDDFFSDEELPKFDSTNDDTLTKLVKMGFEEEEALVAIDRIGSDSLEALVDFIGAAQVAKAENALLLPEDKPGCSGNPKLKKRSLYEYEVLGKKRPKLEKRTLCEDEEEAQTLNLPNPMMGFGIPNEPSSMITHRRLPENAVGPPYFYYENVALAPKGVWQTISRFLYDVEPEYVDSKYFCAAARKRGYIHNLPIVNRFPLLPLPPRTIHDAFPLLRRWWPTWDPRTKLNCLQTVHASAKLTDRIRKAVESCDDFEEPSETVKKYVLDQCRKWNLVWVGKNKVAPLEPDEVEMLLGFPRNHTRGGGISRTDRFKSLGNSFQVDTVAYHLSVLKEMYPKGVNLLSLFSGIGGAEVALHRLGIPLRNVVSVEKSEVNRNIVRSWWEQTNQRGNLVDFDDVQQLDADRLERLMGAFGGFDLIVGGSPCNNLAGSNRVSRNGLEGSESILFYEYFRILDLVKVMAPRFR

SEQ ID NO: 605 - protein, 740 aa, Sorghum bicolor
MPVAYHQRPAHCWCCLAGAAREFLVETCLEIRRLPLSSKSGQSRDGGGRQSRPVAGAASCSSSSSATASQLPARRGRRRREGRSGRGSPRRGGADGDGRGEAAEVVRGGAERGCAVPLRPVPQPPEPLREGSGMAHWVSDGDGSDSFEWDSDGNGEEAGSFNTAGASSSAMASTNTDAPGPSRRVSQVANGNGKAGPSASLVQRYIDMGFAEEIVVKAIKDNGDNGADALVELLLTYQELGNDLNVDNGFASGCVPQTVDDSGDDDFLENWDDLDAGGRSTRVANSVDDSGDEDFLHEMSQKDNKIDSLVKMGFPEDEAALAITRCGQDASISVLADSIYASQTAGDGYCGNLSDYEDGGRNKGRFMDGNNKKRKRYGSQALGSRGPLDGSADEPMLLPNPMVGFSLPDQWPRPVNRDLPALAMGPPYFYYENVALAPKGVWTIISRFLYDIQPEFVDSKYFCAAARKRGYIHNLPLENRSPLLPKPPRTITVAFPHTKRWWPSWDPRQQFNCLQTCVSSAKLLEKIRVTLTNSSDPPPPRVQKLVLEECRKWNLAWVGLNKVAPLEPDEMEFLLGFPKDHTRGICRTERFRSLGNSFQVDTVAYHLSVLKDMYPEGMNVLSLFSGIGGAEVALHRLGIRMKTVISVEKSEVNRTILRSWWDQTQTGTLIEINDVQTLTSERIEAYIRRFGGFDLVIGGSPCNNLAGSNRHHRNGLEGEHSSLFFQYVRILESVKSIQRL

SEQ ID NO: 606 - protein, 598 aa, Oryza sativa
MVDWASDSDNDKFEWDTDGEAETSSAPALRNIDAPGPSTRLPQDANGKANGSGALVAEFMGMGFPKEMILKAIKEIGDTDTEQLLELLLTYQAIGGDASVGNCSASACAPQTLEVDEEEDDTNWDEYDTAGNCDRTPHSDGSGDEDFFQEMSEKDEKMKSLVNMGFPEDEAKMAIDRCGLDAPVAVLVDSIYASQEAGNGYSANLSDYEDTEFSSFGGRKKTRFVDGSKKRKRYGSGPSGNQVPFDGSHEEPMPLPNPMVGFSLPNERLRSVHRNLPDQALGPPFFYYENVALAPKGVWTTISRFLYDIQPEFVDSKYFCAAARKRGYIHNLPIENRSPVLPMPPKTISEAFPNTKRWWPSWDPRRQFNCLQTCMASAKLTERIRCALGRFSDVPTPQVQKYVLDECRKWNLVWVGKNKVAPLEPDEMEFLLGYPRNHTRGVSRTERYRALGNSFQVDTVAYHLSVLRDLFPNGMNVLSLFSGIGGAEVALHRLGIHMKTVISVEKSEVNRTILKSWWDQTQTGTLIEIADVRHLTTERIETFIRRFGGFDLVIGGSPCNNLAGSNRHHRDGLEGEHSALFYDYIRILEHVKATMSAV

SEQ ID NO: 607 - protein, 592 aa, Brachypodium distachyon
MPQDCISDSDDSAKFEWESDNEAEPSSAPVLRNFDAPGPSTVWQDANGWANGDAPSTSLVEEYVGMGFPKEMVLKAIKEIGHNDANALLELLLTYKVLGEDPTVGNCSTLGCAPQSVEDDDDGDLDSEDWDDEDDADGGEPNFDSSGDEDFLQEMSEHDKKIKSLVDMGFPEDESNMAIVRCGVDAALTVLVDSIYASQAAGDCNSRNSSHHEVCDSFGGRRNKKKRKQYGGGAQGNRPSECHEELMPLPNPMVGFSLPTARLPSVSRRLPKQATGPPFFYYENVALAPKGVWTIISRNLYDIAPEFVDSKYMCATARKRGYVHNLPIENRSPLLPLPPKTIFEAFPHYKKWWPSWDPRRQLNCVQTCVSSAKLTERIQCALARSGDPPPLHVQKYVMHECRKWNLVWVGKNKVAPLEPDEMEYLLGYPRDHTRGIGKTARYKCLGNSFQVDTVAYHLSVLRDIFPNGLNVLSLFTGIGGGEVALHRLGIHMKTVVSVEISEVNRRILRGWWDQTQTGTLIEIPDVQSFTSDKIRSFIRRFGGFDLIIGGSPCNNLAGSNRHHRDGLEGEHSSLFYHYPRILDTVKDVMAGM

SEQ ID NO: 608 - protein, 634 aa, Populus trichocarpa
MDGDSLCGDNDDFDWDSEDEKEIENFASSSSSSLRLPQVETRSSSAEASSSVGSSSGSKMIDHFVKMGFPEKMVAEAIQENCKGEEDEDSILETLLKYSTSSSASSSGSKLFDRFVGMGFAEKMVAKAIKENGEGDADSVLETLLTYAAIGKSPQEQPNNDSDHCSSGHEGSFLDDFSDVDSADDEVITKTVSDEDNKLAFLRRMGYKEADASIAITRCGTEATISELADFICAAQIAKAEDAFFAEDEKKPKHLDKQKKRSFLESDVLEKKRQKGLENGDDEGVRLPNPMVGFGVPTEPGIVTRRTLSEAAIGPPFFYYENVALAPKGVWQTISRFLYDVEPEFVDSKHFCAAARKRGYVHNLPIHNRFPLLPLPPNTIHEALPLTRKWWPAWDERTKLNCLQTCIASAKLTERIRKALEAYEGEPPLHVQKFIMDECRKWNLVWVGRNKVAPLEADEVEMLLGFPRNHTRGGGISRTDRYKSLGNSFQVDTVAYHLSSLKDLFPGGINVLSLFSGIGGAEVALHRLGIRLKNVVSVEISNVNRSIMSCWWEQTNQTGNLIHIEDVQHLTADRLEQLMNMYGSFDLVVGGSPCNNLAGSNRHHRDGLEGKESSLFFDYCRILDVVKNLTSRYS

SEQ ID NO: 609 - protein, 616 aa, Vitis vinifera
MVDPLYFRSGLGHALDGNISGEESDSIDWNTDDELETQNLPPSSSSTLIIPGGEASIASGEASSSTGPSNSKLINHFMGMGFSEKMVVKAIEQDGEGNTDSILEYLLTYSALENCPQELENSPQAEPQVVSDNCSSDYDESFLDDFSDTDSCHENQENINSLSDKEKKLLFLADMGYTVEEASIAMDRCGPDSSVVELTDFISAAQISKAADADLGELSDEEKPRPKHLYKDYNKQKKRKFLDYRLWERKKQRGYEKKLRNEDDEPIRLPNPMVGFGVPAEPCPVFHRTLPEAAVGPPYFYYENVALAPKGVWSTISRFLYDVEPEFVDSKYFCATARKRGYIHNLPIQNRFPLLPLPPLTIYEALPLTRKWWPSWDTRTKLNCIQTCVGSAKLTDRIRKALEEWDGVPPMSVQKYVLDECRKWNLVWVGRNKLAPLEPDEVEMLLGFPRNHTRGGGISRTDRYKSLGNSFQVDTVAYHFSVLKDMFPGGITLLSLFSGIGGAEIALHRLGIPLKNVVAVEISETNRNILRSWWEQTNQRGTLVDIADVQQLNGDRLEQLIHTFGGFDLIVGGSPCNNLAGSNRVSRDGLEGKESALFYDYFRILDLVKCIMGRNQ

SEQ ID NO: 610 - protein, 586 aa, Cucumis sativus
MAGDDFGVEVDNIDWDTEDELEIENIPLGSHASLAFPGVEANMASSSAGPSNSKTVDYFIGMGFSAKMVAKAIEDNGEENTDSILETLLTLSALENSPPKQQHVDTDDSFSDYEGSFLDDFSDLDSDYENEATAKPVSDADNKMTFLVDMGYSEDEAYAAIERCGVHSSFAELTDFISAAQISKAADVLLGDLPVRPKPKNLNGCSKLNKRRHYDDDTWKKKKPRCFEDEDDDTIRLPNPMIGFGVPNELCLTVHRKIPEAAMGPPYFYYENVALAPKGVWNTISRFLYDVEPEFVDSKYFCAAARKRGYVHNLPIHNRFPLLPLPPHTVHEALPLTRRWWPSWDTRTQLNCLQTCIGSARLTDRIRRALEDYDGVRDPPLHVQKFVVEQCRKWNLVWVGKNKVAPLEPDEVEMLLGFPKNHTRGGGISRTDRYKSLGNSFQVDTVAYHLSVLKDMFPGGINLLSLFSGIGGAEVALHRLGIPLKNVVSVDISEVNRNIVRCWWEQTNQKGTLIDLADVQELDADRLQYYMNLFGGFDLVVGGSPCNNLTGSNRYTRDGLEGKESILFYDYFRILDLVKCIATKTE

SEQ ID NO: 611 - protein, 628 aa, Arabidopsis lyrata
MAQDSAGDDDFVDWNTDDDLEIDNFQSSPPSSPIQSRVETLVGVAVTTSSLSSPTETTDLVQMGFSDEIFATLFDMGFPVEMIARAIKETGPNAETSVIIDTISKYSSNCEAGSSKSKAIDHFLAMGFDEEKVIKAIQEHGEENMEAIANALLSCAEAEKLPVVEEEDVIDWSSDDETNYSDILVSDDEKDPNSKENSNQIRSLVRMGFSELEASLAVERCGENVDIAELTDFLCAAKMAREFSEFHTDPEERKPRNDIKKRRLESKKEPRSSVDDEPVRLPNPMIGFGVPNEPGLITHRSLPELARGPPFFYYENVALTPKGVWETISRHLFDIPPEFVDSKYFCAAARKRGYIHNLPINNRFQIQPPPKYTIHDAFPLSKRWWPDWDKRTKLNCILTCTGSAQLTNRIRLALEPYNGEPEPPKHVQRYVIDQCRRWNLVWVGKNKAAPLEPDEMENILGFPKNHTRGGGMSRTERYKSLGNSFQVDTVAYHLSVLKPIFPHGINVLSLFTGIGGGEVALHRLQIRMKLVVSVEISKVNRNILKDFWEQTNQTGVLIEFSDIQHLTNDTIEGLMEKYGGFDLVIGGSPCNNLAGGNRVSRVGLEGDQSSLFFEYCRILEVVRAMRRS

SEQ ID NO: 612 - protein, 1047 aa, Arabidopsis thaliana
MDSAIEISSGSDSDDEVPPQPVWPQTRTRMDPTWLSRRPLPTVDSHARAEHTNQAPPNGASSDTSRPGVSKPFTGNGNTVNSRISSGSGADYVRLSSEQALKRTLPPSFNSPPLPARSGTNNISNASGSRVGVDYERPLSQQALKRTLPPSFNPPPLPSRSGTNNIRNAGGSRFGADYSHPAVSAVGNKSTFGDHYSGAHAEIGIQRGVNGVRILPPSLTHGTSASVLHHAGSSDPMHRFGGGEDRNPDNDERLVYQAALQVLNQPMTESDLPPGTLSVPLMRHQKIALAWMFQKETSSFNCPGGILADDQGLGKTVSTIALILKQKIVSQLKSESSCKQETEALVLDADDESDNAKHESGSHVKPELKVSSNSETSVLSACGNDENDSSDMEKAEDEEANSSTRAFQWKRPAAGTLIVCPASVVRQWARELDEKVSEESKLSVLVYHGSNRTKDPNELAEYDVVVTTYAIVTNEAPNKFLVDEDENDEKNTDRYGLASGFSNNKKRKVVVGASKKSKRRGRKSTNDTSSEPDCGPLGKVGWFRIVLDEAQTIKNYRTQMARSCCTLRAKRRWCLSGTPIQNTIDDLYSYFRFLRYDPYAVYKSFYSTIKVPISRNSCQGYKKLQAVLRAIMLRRTKGTLLDGKPIINLPPKVVNLSQVDFSVAERSFYKKLEADSRSQFKAYADAGTLSQNYANILLLLLRLRQACDHPQLVKRYNSDPVGKVSEAAVRRLPREARSRLINRLESSSAICYECNEPPEKPVVTLCGHIFCYECVLEYITGDENTCPVPRCKQQLARDVVFSESSLRNCTSDDSGCSSSHDNGLDRSVFQKRDFCSSKIKAVLDILQSLSQPDSPNSAQHGQMPSSSRPYDDDDVTIVEPMRLHSSSPSQGAVKTIIFSQWTGMLDLVELRILESGIEFRRLDGTMSLAARDRAVKEFSKKPDVKVMLMSLKAGNLGLNMVAACHVILLDLWWNPTTEDQAIDRAHRIGQTRPVTVTRITIKDTVEDRILKLQEEKRTMVASAFGEEHGGSSATRLTVDDLKYLFMV

SEQ ID NO: 613 - protein, 993 aa, Ricinus communis
MEPIDISSDSDVVIEDDEDFEFETSPVRRPTDSRILPPWAAIATTDSRSSGYGRQTQRDTSPKRPYSSNGSSSNWHSSNGGSSNWHTSQADDSLYAIGNGNAGLPRTVNSRIANVYGTDYEKLSSQQALKRTLPSSLHRSPISSISNSLVEGVSSSQTRDIYGNAYHPAGPSSSHSKGFGRGNYEEAITYVSNGSRTLPPSLMRGKSTPSAQFGLRDPAFHPMAGEEGVAGSDERLIYQAALEDLNQPKVEATLPDGLLSVPLLRHQKIALAWMLQKETRSLHCLGGILADDQGLGKTVSMIALIQMQKFLQLKSKSEDQANKKSEALNLDDDDESGRPGLNEVKQVGEYDDTTSVPEASNSTRVFKRKRLAAGTLVVCPASILRQWAGELDDKVADEAKLTCLIYHGGSRTKDPAELAKYDVVLTTYSIITNEVPKQPLVNEDEADEKDGEKCGLSSEFSINKKMKKTTTVSKKRKKGRKGIDCSSNDYDSGPLARVGWSRVILDEAQTIKNHRTQVARACCSLRAKTRWCLSGTPIQNAIDDLYSYFRFLRYDPYAVYKSFYTTIKVPISRNAIQGYKKLQAVLRAVMLRRTKGTLIDGEPIVKLPPKSTCLTKVNFSTEERAFYTRLEADSRSKFKAYAAAGTVNQNYANILLMLLRLRQACDHPLLVKGLNSDSFGKDSAEMAKRLPNDMVINLLSCLATSSAICRACNDPPEDPVVTMCDHVFCYQCVSEYLTGDDNMCPARGCKELLGPDVVFSEATLRSCMSDNLDAGPKRPEFDERAMVLQNEYSSSKIRAVLEILQSHCQVKSPSPELGGATEYNGSSTAPSSLVIKSIIFSQWTSMLDLVEFSLNQHCIQYRRLDGTMTLGARDRAVKDFNTDPEVTVMLMSLKAGNLGLNMVAACHVILLDLWWNPTTEDQAVDRAHRIGQTRPVTVTRLTIKDTVEDRILALQEEKRRMVASAFGEDASGGSATRLTVEDLKYLFMGRSAP

SEQ ID NO: 614 - protein, 1027 aa, Glycine max
MDSQNGCIYISSSDDDLEEIEDPRRTLPQWATNTEKSSYNGGWSRRDSSSRGANSSNPSSSNVYNHSQVKPQTLPVSSTNTLNHRIARRDEPSYHALNGNTSQQQTVSSRISNIHGADYEKMSSQQAFKRTLPSSLQPSATRALPSSFASDSRLRNLKDNASSSQLHDAYKNRPHGVGPSTSSDRGYIRENFGRGYDEDRFLYQNGGNRILPSPLMLGKVISPQFATSSESAYRSGAGDERAAESDERLIYEAALQDISQPKTEYDLPAGVLSVSLLRHQKIALAWMLQKETKSLHCLGGILADDQGLGKTISMISLILAQRTLQSKSKIDDTCSHKTEALNLDDDDDNGSVDVEKHKNSEESDDIKPSREPSSSTQAPGRKRPAAGTLVVCPASVLRQWARELDEKVGDEKLSVLVYHGGSRTKDPVELAKFDVVLTTYSIVTNEVPKQPLVEEDDIDEKMGERFGLSSEFSVSKKRKKPFNGNKKSKKGGKGIDSSSIECGSGPLAKVGWFRVILDEAQTIKNHRTQVARACCSLRAKRRWCLSGTPIQNTIDDLYSYFRFLKYDPYAVYKSFYNTIKVPISKNTIQGYKKLQAVLRAIMLRRTKGTLLDGKPIINLPPKTIELSKVDFSIEERAFYTKLESDSRSQFKAYAAAGTVSQNYANILLMLLRLRQACDHPLLVKDFDSDPVGKDSVEMAKNLPREMLINLFNCLESTFAICLVCNDPPEEPVITMCGHVFCYQCVSEYLTGDDNTCPSVNCKELIGDDLVFSKATLRSCISDDGGSVSFANSHLCDYSLVQQRDYTSSKIKAVLEVLQSNCKLKISSSDLPNSSGGCRDSPSLDNLHVEDCDSDVRVTKHTRRYSESTTEGPIKAIVFSQWTSMLDLVETSLKQFGIQYRRLDGRMTLGARDKAVKDFNTEPEITVMLMSLKAGNLGLNMVAACHVILLDLWWNPTTEDQAIDRAHRIGQTRPVTVTRITIKDTVEDRILALQDDKRKMVASAFGEDHAGASGTRLTVDDLKYLFMV

SEQ ID NO: 615 - protein, 1033 aa, Zea mays
MNENSAIIISDSDDDSIGSIFDDDDQPASAIARLDQNAEGRIINFEDEDWQRSAPAPPSTKPTENNNGQYRILPASLTNGRHAESSRYTFGSVDRIHPHANPYMAMRPGHSTSSRIDSVVEKHNSSTADANDNNKRVLPSSFSNGNTSKSMHPIVASETRKLPLPLSTKKSPNIGENRMGTNIANGNLQPSSSIMARGTSSTLNTHKVDDDDDVIVYGGSSSHRVLPSTFEATNSNNSEVAKGFETHSRLNPENRVLDYAERAVYQEALQNISREKSEDDLPEGVLAVPLLRHQKMALAWMVSKENSSHCAGGILADDQGLGKTVSTIALIQKQRMEQSKFMFVDSDRLKSEALNLDEDDEGEQTVSNEPKKDQGACSLSTSAGTSAELFVNQPNNVVNKMVETKAERKKKAKVSTSSASTSRSMTRPAAGTLVVCPASVLKQWSNELTDKVSESAKLSVLVYHGGARTKDPRELAKYDVVVTTYTIVANEVPKQMADDDADQKNSEEPSASNKRKPSANMQNKAKKKKKKLKDSNFDLDSGPIARVRWFRVVLDEAQTIKNFRTVVARACCGLRAKRRWCLSGTPIQNAIDDLFSYFRFLKYDPYCTYNSFCTMIKHPIARDAINGYKKLQAVLKVVLLRRTKETVINGKPIINLPPKTINLNKVDFTQEERSFYLMLEERSRQQFKAFAAAGTLKQNYANILLMLLRLRQACDHPILVKGNQSEYGGDGSIEMAKKLPKEVVIDLLAKLEVGSTLCGLCNDTPEDAIVTICGHVFCYQCIHERITTDENMCPAPNCSRTLGLELLFSSGALKICISGKSSSAVASSSSDNESSSISQSSFVSSKIQAAIDILNSIIVMDPLTESYTMESSRSGLGPVKAIVFSQWTGMLDLLELSLNINCIQYRRLDGTMSLNLREKNVKDFNTDPEVRVMIMSLKAGNLGLNMVSACHVILLDLWWNPYAEDQAVDRAHRIGQTRPVTVSRLTVKDTVEDRILALQEEKRTMVNSAFGDDKAGGHATRLTVEDLRYLFRI

SEQ ID NO: 616 - protein, 1314 aa, Medicago truncatula
MADDGFQFSTLFADDDSDDEKLAMDIESFLSVLDEDCVPSESSPEDSSLKDVSPGESGIHDDFLLQNGNSLLDSEHENQGPSSRTCSSPNVFAGGYRDSFSVAESDETCYAERAGVSEHEMPSYSVGTSSNPSLWKDDDYSQIKHVVDDVESEYASHSSIIENVDGTFEDYGTALKDTIGVSRQPENDSCTSFEMPFVDVDIPTHFGNSADSTFCQGSNVPSDFSGYYSSLNCYQGIDVRPVVTGSSGYFPNGVGSEFWKNEEPVRNMKVEKTEFLTDTTNVIGGMDLSTIGRIPFHDSQFMPVNNEYPSFFPGNAKFEDGESVQQSSCVPYISSEGQSFNVKAEGDEMVMPYQNTFHNDNAGLEVKQLPGIFPTTGYQNYDFFKVEDSNAIVTTEDANYYQDLIGETANKFPGNMGNLNFRSLDKSLSIARASIANGNQYNCSMSELESKPSECKSIDSQLSKRSTEGSNDEDDCDVCIIEDISHPAPTSRSAEFNSLNMSQSSRFDYTQPYMAGGTRPKAHDEQYILRAALQDISQPKSEVTPPDGLLAVPLLRHQECGSDGLDLEFKIALSWMVQKETSSLYCSGGILADDQGLGKTVSTIALILKERPPLLKTCNNAQKSVLQTMDLDDDPLPENGLVKKESTVCQDASDRNATTSANLSVHAKGRPSAGTLVVCPTSVLRQWADELHNKVTCKANLSVLVYHGSSRTKDPYELAKYDVVLTTYSIVSMEVPKQPLVDKDDKDDKEKGIYEDHPVPNRKRKCPPSSKSGKKALNSMMLEAAARPLAKVAWFRVVLDEAQSIKNHRTQVARACWGLRAKRRWCLSGTPIQNAIDDLYSYFRFLRYDPYAVYTSFCSTIKIPINRNPSKGYRKLQAVLKTIMLRRTKGTLLDGEPIISLPPKSVELRKVEFSQEERDFYSKLEADSRAQFQEYADAGTVKQNYVNILLMLLRLRQACDHPLLVKRYNSTTLWKSSVETAMKLPREKQLFLLKCLEASLALCGICNDAPEEAVVSVCGHVFCNQCICEHLTGEDNQCPATNCKTRLNMSAVFPKATLNSSISDPACDHLPGSEVEDSEPCSRTQPCDSSKIRAALEVLQSLSKPQCHTSQRSHVQSTSRESSDCSSTSANNGKSISDVPEKKAMFMEKSSNDSVGSLGEKAIVFSQWTGMLDLLEACLKDSSIQYRRLDGTMSVLARDKAVKDFNTLPEVSVMIMSLKAASLGLNMVAACHVLMLDLWWNPTTEDQAIDRAHRIGQTRPVTVLRLTVKDTVEDRILALQQKKRTMVASAFGEDGTSGRQTRLTVDDLKYLFMM

SEQ ID NO: 617 - protein, 1385 aa, Physcomitrella patens
MEYRLVSSPREPVLTSSSIDITSNVHPITFGSDGQVSVLPTTDSVQQTNDNEIVQRALVKFMQDVRSFVRQGNWKESSTGLFHRSSTDCARDPFQVSVAETIGSLEWGIFGSAGMGESRLRGDYSCSELGQDGMGELEGAQNNWREGEADVEDGSEPVRDETDQRDVYLDELLSVIEDDPDSRVLRIPPGLESRSGESCRSCSYDLEFEVYAPLTILVSPQAAPRFQATSAMDEVLETDGTMPLLGPAVSHQELGIAPYAPAVPEGHYGLSLAPSFNHTTSEVFWQRDLNGSGEGFEETSDEVLSLEDTEQDTIQYFPELTGDLDYDRPQQNDGSVLASNCYSERLSPGVSRPSRSTSSSPIAMFDNTSRHGLVFDSPFERNSIVENPRQFTILNGHAIVDLTSDDSDGDEEESELKEIDGRSRGKRKLPHDETEGDRKRLRETANSSYMQNIGTGFPYTQIAKKPCETISFPNRSQSWSPSSLKYSSQLGNLESSVTTATSLKNIPGYESHKTTSARRDTYTSSLTNMAQRSCSGEVSTSYDRGISRVLPGTVARSMAGLVNGMRVAATIDHRLALAMDPVKRSEELAIQAVVQAFSLGDEKEELTPDEDLLTMTLLKHQRIALAWMVNRESGRHEPCGGILADDQGLGKTISTISLILKNRAPILKSGSTSAQSVQLEGSTVDLDAYEDDEDQLLLKKEFENGQWPASALIENGNQLQQDEPKSSQPSSKGRPAAGTLVVCPTSVLRQWAQEIRDKVSIKADVSVLVYHGSNRIKDPHEIAKFDVVLSTYSIVSMEVPKQALPEEKEVDNRRSAFDYGISQFTKPKKDKPEKVKKAKAKGKGAGADGDSSDSGPLARVAWFRVVLDEAQSIKNYRTQVARAVWGLRAKRRWCLSGTPIQNSVDDLFSYFRFLRYSPWGDVYKKFQRDIKDPVGRNPTEGYKKLQAILKPIVLRRTKTSFLDGKPIVNLPQRIVKLQQTEFSLNERSFYSNLETESRAQFQMYAAAGTVQNNYVNILWMLLRLRQACDHPMLVKKCAKSEALQKTTLEAVRKLPPHQRAALIQCLEGGRAICYICQDAPEDPVVSICAHVFCRQCVSEQMNGDDTTCRFPKCKKSLNVSLLYTLSALKDSGVCEESSSLIKEEKSSEPAITELDQSWKTSSKIDAMMNTLQALPKVIVLVEDGKIVKGPKAETLLKAEAVEIDQGETLSSGLPVVSETTVSKIDKVESTEKAIVFSQWTSMLDLLETPLKKSGLCYRRLDGTMSVVARDRAVSDFNTLPEVTVMIMSLKAASLGLNMVAANHVLLLDVWWNPTTEDQAIDRAHRIGQTRTVNVSRFTIKNTIEDRILALQERKRQIVASAFGENSGGEQKNRLTVEDLRYLFRV

SEQ ID NO: 618 - protein, 1255 aa, Sorghum bicolor
MAEEPAVGYDGFEAAGDAGAGGAEDNLSMPLGDFMAFLETEPAPPEEGGEEEEEQEQLQPGVNQGCFEMPANTDGSEDLLQSHEEMFENADLWSNYSHVDTSECHMELSGGEQMIDHTEASPYEFFSNDLQNQSRTSNLDNEHFPRDASNHANVEEVAGPPYEDLSNGLYLRQQTLYSGQTQFQVENNTEGMETQMNTYFSGGISTEHSDLMLGSTGQDGDHFTSMGMFSLTHKTDVPDISCTEFNMGEGTESIRNGNSSCLTMQEAECGGYPHPDCISVDMVDERSLHDLPHGFSQNNEQYEMEQFPQSICESGSMQMGSPDQYCDDTSLSDFYMDVSSPESISCEQNQSEDICFKSESSTDSSPIPSSRNSTTEDADKYLGQTSKQLLDSKIVPFSNQHTFKNMGYQKPLALHKQYAYRSDNSSIHNSSRGCFNRDGDGASDLCVLEGNRNPAPDHRLPYQGKFHHNFQQHMYSNSMIPAFGGMRYKPHDERITLRLALQDISQPKSEANPPDGVLAVPLLRHQKIALSWMVQKETSSSHCSGGILADDQGLGKTVSAISLILTERSPVPQSSTIKNEPCEAVTLDDDDEDDSVEPHPKKLMQTCSSKVTTNTVKQENPFVAIKTRPAAGTLVVCPTSVLRQWAGELKNKVTSKANLSFLIYHGSNRTKDPNELTKYDVVLTTYSIVSMEVPKQSNPDSDDEEKGKPDRYGAPVSSSGSKKRKAPSKKTKCKSAAESCLPEKPLAKVAWFRVILDEAQSIKNYRTQVARACWGLRAKRRWCLSGTPIQNAVEDLYSYFRFLRYDPYAVYKQFCTMIKIPISRNPTNGYKKLQVVLKTVMLRRTKATMLDGKPIISLPPKTVSLKTVDFTGEERAFYNTLEVESREQFKEYAAAGTVKQNYVNILLMLLRLRQACDHPHLVRGYNSSSSWMSSLEMAKKLPMERQHELLNCLQSCSALCALCNDAPEDPVVTICGHVFCNQCILEQLTGDDSVCPVSNCRVRLNTTSLFSRGTLECSLSRLTCDFKSDDDTCMEMIHAEKRPGIDSSYASSKVRAALDILLSLPRIDPTQMTDSKCSIGLESEKFDGRGTSEQIDTKLTEKAIVFSQWTRMLDLLEVHLKASHVTYRRLDGTMSVAARDKAVKDFNTVPEVTVMIMSLKAASLGLNMVAACHVLMLDLWWNPTTEDQAVDRAHRIGQTRPVTVSRLTIKDTVEDRILALQEKKREMVASAFGEDKSGSRQTRLTVEDLNYLFMV

SEQ ID NO: 619 - protein, 1030 aa, Oryza sativa
MLAGNMNNDNYIDLSSDSDIDFDFDSDDSVGGLDQELASSSSRPTENINGQYRTLPPSFTNGRHVDNARHALGSGDRAYPHSSSYRGSPNDSARATPASNRTDIVVKKHNGFASEENDNGKRILPSSFSNGRTTNAMHPVVASETRKFPPSFTNGNSQRLAENRMGKNVANGIGEPSSSRFPSRSSFGTDNKKVITDSDNEDVYVYGSSSSHRVLPPSFGRNSSANHSEFANGIDMQGRLNLENRIIDSDERAVYQEALQNIIQDKREDDLPEGVLSVPLLRHQKMALAWMVSKENSSHCAGGILADDQGLGKTVSTIALIQKQRIQQSKFMSVDSDRLKAEALNLDDDDEAAPVADNKGEQTKNDEPRKDLGAGSSSTAAGTGDVETCASLMNTAPDKTVERNVERKKKSKASTSSTMQSMTRPAAGTLVVCPASVLKQWANELTDKVGESAKLSVLVYHGGSRTKDPNELAKYDVVITTYTIVANEVPKQNADDDTDQKNGEESSAGNKRKQPPKAQSKSKKKKKKLKDSDIYLASGPVARVRWFRVVLDEAQTIKNFRTQVAKACCGLRAKRRWCLSGTPIQNAIDELYSYFHFLKYDPYSTYNSFCTMIKHPIARNAVHGYKKLQTVLRIVLLRRTKETLIDGEPIIKLPPKTINLDKVDFTKEERAFYLTLEERSRQQFKAYAAAGTLKQNYANILLMLLRLRQACDHPLLVKGHQSEYKGDGSIEMAKQLPKEMIINLLAKLEVGEFCSVCSDVPEDAVVTMCGHVFCYQCIYERITTDENMCPSPNCGNTLSTDSVFSSGALRICMSGVSSSHASGSSSLDDESSSISQTSYISSKIQAAIDILNSIINTYALTDSDTVESNPSRVAPVKAIVFSQWTGMLDLLELSLNSNLIQYRRLDGTMSLNSRDKAVKDFNTDPEVRVMIMSLKAGNLGLNMVAACHVILLDLWWNPYAEDQAIDRAHRIGQTRPVTVSRLTIKDTVEDRILALQEEKRAMVSSAFGEDKSGGHATRLTVDDLKYLFRF

SEQ ID NO: 620 - protein, 1070 aa, Brachypodium distachyon
MLASNMNNDNDNVIDLISDSDDDFDFDSDDPTSTSVTSVRNGEGQPIRLQDEDLARTMLSTPSSSRPLKNSNGQYRTLPPSFANGIEPLKNSNGQYRTLPPSFANGIDIKKARYTRGSGDRTYPHSSSYVGSPYDSARATLTSNRIASVVKELNGSALDANDNDKMILPSSFSNGSTAKSINPNVASDSRRLPSRFANGNSQKMVENMMESNDAKQIGQPSSSKFPTQNLSLSNAQKVITDDDDDDDIYVYGGTSSNRVLPSSFGGNNSANNTDLVNGNGMQARPNLESRFLDSEERAVYQEALQNISLDKKEDDLPEGYLSVSLLKHQKMALAWMVSKENSSHCAGGILADDQGLGKTVSTIALIQKQRIPQSKFMSADSDALKSEALNLDEDDETVTVVDKGEQILNNEPKELGASLSSTAASISGVKPCISEIEVPDRMAESKVECKKKTKTGTSSASSMHSMTRPAAGTLVVCPASVLKQWANELTDKVGESAKLSVLVYHGGARTKNPSELAKYDVVVTTYTIVANEVPKQNADDDPDQKNAEESSAGNKTKPSSKSKKRKKKLKDSDIDLNSGPVARVRWFRVVLDEAQTIKNFRTQVAKACCGLRAKRRWCLSGTPIQNAIDELYSYFRFLKYDPYSTYSSFCTMIKHPIARDAVHGYKKLQTVLRIVLLRRTKETKINGEPIINLPPKTINLNKVDFTKEERAFYSTLEERSQQQFKEYAAAGTLNQNYANILLLLLRLRQACDHPLLVKGHQSVFKGDGSIERARQLPKDLVIDLLAKLEVSSLCAVCRDTPEDAVVAMCGHIFCYQCIHERITTDENMCPTPNCRTTLSTESVFSSGTLRICIAGNTCTYATASSSADDELSSISQSSYMSSKIRATVDELNTIINTHAITDSDTSESNPSQVAPVKAIVFSQWTGMLDQLELSLNNNLIRYRRLDGTMSLNLRDRAVKDFNTDPEVRVMIMSLKAGNLGLNMVAACHVILLDVWWNPYAEDQAIDRAHRIGQTRAVTVSRLTIKDTVEDRILALQEEKRAMVNSAFGEDKSGGHATRLTVEDLRYLFRI

SEQ ID NO: 621 - protein, 1327 aa, Populus trichocarpa
MIMADGRSGSVMPGGEIMAVGDGNSGDGEEEDLSMDVDLFYTILGEEPSPASPKIEGADGLGGESMDHAAYSLHNPEGSDARAGHLGGSIDYTGRQMSSLMHARSGSSREFCFPFQKDQGTMRAGASQSEIASCITEPTTFADGVSSCVADHAGSSHGPRMDGLDEKFGSRDALDNDSLGILELKTDIHRSMVMPLMDTDHDMISTKSADWHYPGFNSELRDHDSAMQFGMNGYDAHYTDSSGFDFSSDFNFGLFPINQEINEFQPENACSGPEISMMPCSDVNGMNFKSEGDGYTFPKTRKFSSSADDGLNHDKASVMPPSDIQLGISEVQTVCVEDEKTDGLVACRNMTWQTGEGVTEAVDRKCSWSDGNGTFVYKDKQQSPSGVLSSVQSQKHVIYTNDDRGGMALGSSRAQVEGIAGRFPFDSVYLNLSASEQYLPFAPTSHLSKMQLGCGKDEKQGLPIHSKALGSHLSIVSPESIQSNSSGSKSHVDDEPDICILDDISQPARSNQCFAPSKPIVPLLHPTYNDSLHHSTVEGTRFKANDEQLVLRVALQDLAQPKSEAVPPDGFLAVPLLRHQRIALSWMVQKETSSLHCSGGILADDQGLGKTVSTIALILKERAPLCRVDAVAVKKEECETLNLDDDDDGVIEIDRLKKGADGSQVKSNRSSTKSLNSPGQSKGRPAAGTLIVCPTSVLRQWADELHTKVTTEANLSVLVYHGSNRTKDPSEVAKYDVVVTTYSIVSMEVPKQPLADEDEEKQRMEGDDVPHLGLSYGKKRKYPPTSGKKGLKNKKGMDSAMLESIARPLAKVAWFRVVLDEAQSIKNHRTQVARACWGLRAKRRWCLSGTPIQNAIDDLYSYFRFLRYEPYAVYKLFCSAIKVPIQKNPAKGYRKLQAVLKTVMLRRTKGTLLDGEPIINLPPKVVELKKVDFTEEERDFYTRLEIDSRAQFKEYAAAGTVKQNYVNILLMLLRLRQACDHPLLVKGLDSNSLGGSSIEMAKKLPQEKQLCLLKCLEASLAICGICSDPPEDAVVSVCGHVFCKQCICEHLTGDDNQCPVSNCKVRLNVSSVFSKATLNSSLSDEPDQDSSGSELVAAVSSSSDNRPHNSSKIRATLEVLQSLTKPKDCLSKCNLSENSADGNVACHETSSGSTGSLNDGTDKRHPPAKVVGEKAIVFSQWTGMLDLLEACLKSSSIQYRRLDGTMSVVARDKAVKDFNTLPEVSVMIMSLKAASLGLNMVAACHVLLLDLWWNPTTEDQAIDRAHRIGQTRKVTVLRLTVKNTVEDRILALQQKKREMVASAFGEDENGGRQTRLTVDDLNYLFMV

SEQ ID NO: 622 - protein, 1013 aa, Vitis vinifera
MDPIDITSSSDSDFDFEDDRETDTSPVGESVAFANSRILPPWPSTSGTNSKSTSHGHFQKVPSPKRASASNGSSSNFYHYPPKIQMHPSFDDDIRASNRHNFREADFNYSTENGDMLDVENHQQLINLNKADIFGADYEKLSQPAMRRTLPSTLQPSAPSAGMNNTVGNIGSSHIHDSQGKSFHPVGPILNNMNYMKEHFGRGNDDEVIMYENSGSRILPPSLMHGKSVPSTQYGGVSESAYRPGVAEEMAANTDERLVYQAALQDLNQPKVEATLPDGLLTVSLLRHQKIALAWMHQKETRSLHCLGGILADDQGLGKTVSMIALIQMQKSLQSKSKSEELHNHSTEALNLDDDDDNANAAGSDKGKQTEETSDSKPISEVSASLPEFRRRRPAAGTLVVCPASVLRQWARELDEKVSEEAKLSVCLYHGGSRTKDPVELAKYDVVLTTYSIVTNEVPKQPLVDDDEGDERNGEKYGLSSEFSVNKKRKKPSNVSKRGKKGRKGIDSSSIDYDCGPLARVGWFRVILDEAQTIKNHRTQVARACCSLRAKRRWCLSGTPIQNAIDDLYSYFRFLKYDPYAVYKSFYNTIKVPISRNSVHGYKKLQAVLRAIMLRRTKGTLIDGTPIINLPPKTICLSKVDFSSEERAFYSKLEADSRSQFKEYAAAGTVNQNYANILLMLLRLRQACDHPLLVKGYNTDSIRKVSSEMAKKLPSDILINLLDILETSAICRVCNDPPEDAVVTMCGHVFCYQCVSEYLTGDDNTCPALECKEQLGADVVFSKATLISCISDELDGSLSNSSQSAEKSINLQNEYSSSKIRAALEILQSHCKLTSPDSDPHSSMGCNGSYSNPETEGPIKAIVFSQWTSMLDLVEMSMNHSCIQYRRLDGTMSLASRDRAVKDFNTDPEVTVMLMSLKAGNLGLNMVAASLVILLDLWWNPTTEDQAVDRAHRIGQTRPVTVSRITIKDTVEDRILALQEDKRKMVASAFGEDQTGGSATRLTVEDLKYLFMV

SEQ ID NO: 623 - protein, 1286 aa, Cucumis sativus
MVISDDLINQSPLLSIAGEVLGFQTFLIRFCFQTSLFAGLCVFSGFSLMIILMADEASNFPLQYADDDFDEDMSMEYEKILHLLSEDLDPLQIKTEDLSPNNASTGQPAFDSSNQENFQLQNDISHGFMDVTLKNHDSLDGKGTETLRSSENNSCASVELPSFDAEHSSKEVFPTESTVNPSFDFVTDVTNSYSTMPYWMSTVEQPFLVSSQYLFPGDYDSPLVSGNGDMTVNMMHDVEFPSNSLCSSTTMDLYAQGATDHKSVSRESVSKDLILDRYSNVKRWDQNCESGNFISSFDGKYPFHVDNLHIGQASMGIPMSTELNSSCKELVSQMKNETMDSLVESCSGPWQSMMEENLFFQSQRVFRSEDMVCGTSGRLSNDGRYQNLYITDQYSPNGHSSNLSNQPLVFIKDDRDHKLSVRKSDIDHPQVSPESTHSNLSDRAHVEDDPDICIIEDMSHPAPSNRSLMVGKSVASQSFSIVSGSSTYMGIGSLRQKAKDIDILKVALQDLSQPKSETSPPDGALDVPLLRHQRIALSWMVQKETSSVPCAGGILADDQGLGKTISTIALILKERAPIRACPTVKHEELETLNLDEDDDIHPEHDGPKQEFSHQVSPSKDLTLSKNTSVQAKGRPAAGTLVVCPTSVLRQWADELHNKVSSKANLSVLVYHGSSRTKDPCELAKYDVVLTTYSIVSMEVPKQSVVDEEDDEKHNTEEQAILPSHLSSSKKRKNFSGSDKKHSKNKKGVDNEVFESVARPLAKVRWFRVVLDEAQSIKNHKTQVARACWGLRAKRRWCLSGTPIQNAIDDLYSYFRFLKYDPYAAYKSFCSAIKFPINKNPAKGYKKLQAILRTIMLRRTKATLLDGQPIVTLPPKHVELKKVDFTEEERDFYSKLEADSRAQYEEYAAAGTVKQNYVNILLMLLRLRQACDHPLLVKPYDSKSLWRSSADVAKKLPRDKQIFLLNCLEASLAICGICNDPPEDGVVSECGHVFCKQCILEHLSSDDCQCPTGGCKVHLNASLLFSKSSLCNSNSDQLGEDNSVVSSCSTVGDSMELSSSVMYESSKIKAALEVLMSLAKPKEYSRNTSPELAVVGASEKSMDASSTELRLESSECQDSTNKSSCELVKRGGEKAIVFSQWTGMLDLLEACLKNSSIQYRRLDGTMSVLARDKAVKDFNNLPEVSVMIMSLKAASLGLNMIVACHVLLLDLWWNPTTEDQAIDRAHRIGQTRPVTVLRLTVRDTVEDRILALQQKKREMVSSAFGEDEAGGRQTRLTVEDLNYLFMM

SEQ ID NO: 624 - protein, 1046 aa, Arabidopsis lyrata
MDSAIEISSGSDSDDELPQPIRPQIRTRTDPIWLGIEIVPTVDSHARAEHTNQASRNSASNDTSRPGVSKPFTGNGNTVNSRISSGSGADYERLSSEQAPKRTLPPSFSSPPFPSRSGANNISNASGSRVGADHERLSSQQAPKRTLPPSFNPPPLPSRSGTNNISNASGSRFGADYSRPAVSAVGNKSTFGDHYSGAHAEIGIQRGMNGVRILPPSLTHGTSASVLHHAGSSDPMHRLGTGEDRNPDNDERLVYQAALQDLNQPITESDLPPGVLSVPLMRHQKIALAWMFQKETRSFNCAGGILADDQGLGKTVSTIALILKQKIVSQLKSANSCKQETEALVLDADDESDNAKHENGSHVKPELKVSSNSETSVLSASGNDENDSSDMEKAKDEEANSSTRAFKWKRPAAGTLIVCPASVVRQWARELDEKVSEEWKLSVLVYHGSNRTKDPNELAEYDVVVTTYAIVTNEAPKKFLVDEDENDEKSTDEYGLASGFSNNKKRKVAVGASKKSKKRSRKSTDNSSSEPDCGALGKVGWFRIVLDEAQTIKNHRTQVARSCSTLRAKRRWCLSGTPIQNTIDDLYSYFRFLRYDPYAAYKSFYSTIKVPISRNSCQGYKKLQAVLRAIMLRRTKGTLLDGKPIINLPPKKVNLSTVDFSVEERSFYRKLEADSRSQFKAYADAGTLSQNYANILLMLLRLRQACDHPQLVKVYNSDPVGKESEAAVRRLPREARSRLINRLESSSAICYECNEPPEKPVVTLCGHVFCYECVLEYITGDENMCPVPRCKQQLARDVVFSESSLRNCISDDLGCSSSHDKGLDRSVFEKREFCSSKIKAVLDILQSLSKQDTPNSAQHGQMPSSSGPYDDDDVTIVEPMRLHSSSPSQGAVKTIIFSQWTGMLDLVELRILESGIEFRRLDGTMSLAARDRAVKEFSKNPDVKVMLMSLKAGNLGLNMVAACHVILLDLWWNPTTEDQAIDRAHRIGQTRPVTVTRITIKDTVEDRILTLQEDKRTMVASAFGEEHGGSSATRLTVDDLKYLFML

SEQ ID NO: 625 - DNA, 1995 bp, Artificial Sequence; identical to SEQ ID NO: 452
  Synthetic Construct

SEQ ID NO: 626 - DNA, 121 bp, Artificial Sequence
  Synthetic Construct
ggatcatcaacaagtttgtacaaaaaagcaggctctttaaagtatttttacaacaattaccaacaacaacaaacaacaaacaacattacaattactatttacaattacaaaaaaagttacc

SEQ ID NO: 627 - DNA, 4098 bp, Artificial Sequence
  Synthetic Construct
atggacaaaaaatacagcattgggttggccattgggacaaatagcgtgggttgggcagtcattacagacgaatacaaggttcctagcaagaagttcaaggtgttgggcaacactgacaggcactcgatcaagaaaaatctcattggtgcactccttttcgatagtggggagactgccgaagcgaccagactgaaaaggactgctagaaggcgctatacccggcgtaagaatcgcatttgctacctccaggagatattctctaacgaaatggccaaggttgatgacagcttctttcatcgcttggaggaatcattcctcgtcgaggaagacaagaaacacgagcggcatccgatctttggaaacattgttgatgaggtcgcatatcacgaaaagtaccccacgatctaccatcttcgcaagaaactggtggattcaactgacaaggctgatctgcggttgatatacctcgcacttgctcacatgatcaagttccgtggccattttcttattgagggagacctgaaccctgataattctgacgtcgataagttgttcatccagctcgtgcaaacatacaatcagctctttgaggaaaaccctatcaacgcctctggagttgatgccaaagcgatcctttccgcgaggctgtcgaagagtagaaggctggagaacttgatcgcccaacttcctggcgaaaagaaaaacggtttgttcgggaatctcattgcgctgagcttgggactcacgccaaacttcaagtctaacttcgacctcgcagaggatgctaaacttcagctgtccaaggatacttatgatgacgatcttgacaacctgttggcacaaatcggtgaccagtacgctgatttgttcctcgctgccaagaacctcagcgatgccatactcctttcagacatcctccgcgtgaacactgagattaccaaagcacctctgtctgcttccatgataaagcgttatgatgagcaccatcaagacctcactctgttgaaggcgttggttagacagcaactcccagagaagtacaaagaaatcttctttgaccaatctaagaatggctacgccggatatattgatggcggagcgtcccaggaggagttctacaagtttatcaaacctattcttgagaagatggatggtacggaggaactccttgttaaactgaatagagaggatctcttgcgcaagcaacggactttcgacaacggcagcataccgcaccagatccatctcggagagcttcacgccatccttcgccggcaggaagatttctacccctttctgaaggacaaccgtgagaagatcgaaaaaatccttactttcagaatcccttactatgtcggtccactggctagaggcaactctagatttgcttggatgacacgcaagagtgaggaaactatcaccccttggaacttcgaggaagtggttgacaagggcgcatcggctcaaagtttcattgagagaatgactaattttgataagaaccttccgaacgagaaagtcctgcccaagcattcactcctttacgagtatttcacagtgtataacgaacttacgaaggtgaaatacgttactgagggtatgcggaagccggcattcctgtcgggggaacaaaagaaagctatagtggatctgttgtttaaaactaacaggaaggttaccgtcaagcagcttaaggaggattacttcaagaaaatagaatgttttgactcggtggagatcagtggcgttgaagatagattcaacgcttcactgggaacctaccacgacctccttaagatcattaaggacaaagatttcttggataacgaggaaaatgaggacattctcgaagatatagtccttacactgacgttgtttgaggaccgtgaaatgatcgaggaaagattgaagacctatgctcatctcttcgacgataaggttatgaagcagctcaagcgtagaaggtacacaggttgggggcgtctttctagaaagctgattaatggcataagggataaacaatctggaaagacgattctggatttcctcaagtccgacggcttcgccaaccgcaattttatgcagcttatacacgacgattccctgactttcaaagaggacatccagaaggcccaagttagcggccaaggagattcacttcacgagcatatcgccaacctggcgggtagcccggcgatcaagaaagggattcttcagaccgtcaaggtcgtggatgagctggtgaaagttatgggccggcataagcccgaaaacatagtgatcgagatggcccgtgaaaatcagactacccaaaaaggacagaagaactcccgcgagcggatgaaaaggatagaggaaggcatcaaggaacttggaagccagatcctgaaggagcacccagttgaaaacacacagttgcaaaatgagaagctctatctttactatctccaaaatggtagagacatgtatgtggatcaggagttggacattaacaggctctcagactacgatgtcgacgctatcgtgccgcaatcgttccttaaggacgatagtatagataataaggtgctgactcggtcggataaaaaccgtggcaagtcggacaatgttcccagtgaggaagttgtgaagaagatgaagaactactggcgccaactgttgaatgcaaaattgatcacccagaggaagtttgacaacctcacaaaagcagagcgcggtgggctcagtgaacttgataaagctggattcattaagaggcaacttgttgagacacgccagattacgaagcacgtcgcgcagatactggattctaggatgaacaccaagtacgacgagaatgataaattgatcagagaagtgaaggttatcacattgaagtctaaactcgtgtccgattttcgcaaagacttccaattttataaggttcgggagatcaacaattatcaccatgcacatgatgcttacctcaacgccgtggttggtacggcgttgattaagaaatacccgaagctggagtctgagttcgtgtacggggattataaggtctacgacgtgaggaaaatgatcgctaagagtgagcaggaaattggtaaagccaccgcgaagtatttcttttactctaacatcatgaacttcttcaagacagagataacgttggcaaatggtgaaatacgtaagagacctctcatcgagactaacggtgaaaccggggaaatcgtttgggataaagggcgggactttgctactgttcgtaaggtcctctccatgccgcaagtgaatattgttaagaaaacagaggtccagacgggcggattctctaaggaatccatccttcccaaaagaaacagcgacaagctgattgcgaggaagaaagattgggaccctaagaaatatggtgggttcgattctccaaccgttgcctactccgtcttggtcgtggcgaaggttgagaagggtaaatctaagaaactcaaatccgtcaaggaactccttgggattactatcatggagaggtcttccttcgaaaagaatcctatcgatttccttgaggctaaaggctataaggaagtgaagaaggatctcatcatcaagctcccaaagtacagcctgtttgagttggaaaacggaaggaagcgcatgttggcatcagctggagagctccagaaagggaacgagctggccttgccttctaagtatgtgaacttcctctatcttgcgtcgcactacgagaagctgaaaggcagtccagaggacaacgaacagaaacaactttttgttgagcaacacaagcattatctggatgagattatagaacagatcagcgagttctcaaaaagagtcattcttgccgatgctaacctcgacaaggtgctctccgcatacaacaaacacagagacaagccgatcagggagcaggctgaaaatatcattcatctcttcactcttaccaacctgggtgcccccgcggcattcaagtattttgatacaacgattgaccggaaacgttacacaagcacgaaggaggtccttgatgcgaccctgattcatcaaagcataacagggctctatgagacgagaatcgatttgtcacagctcggc

SEQ ID NO: 628 - DNA, 33 bp, Artificial Sequence
  Synthetic Construct
ggagactacccgtatgacgtgcccgattacgct

SEQ ID NO: 629 - DNA, 249 bp, Artificial Sequence
  Synthetic Construct
gccgcggcagctgagttcaagcgcgaggaacaggcccggaaggcgaaagtgaacaatgagaagaaaacagaaatcgttaaacctgagagctgctcaaacgagggagacgttaaggatcttaagaggaaagactctgaggatggcaacgaaggagaggaagaggaagctagctcaaaacctaagaaaccaaaggtggcactctcacatctccaagacattgacgacaccgaagcagaccaagaagaagaa

SEQ ID NO: 630 - DNA, 39 bp, Artificial Sequence
  Synthetic Construct
ggcgggtcaggcggaggcgggagcggaggcgggggcagc

SEQ ID NO: 631 - DNA, 1065 bp, Artificial Sequence
  Synthetic Construct
gagacaattcgtttgcccaaacctatgattgggtttggggttcctaccgaaccacttccagcaatggttcgaagaactcttcccgagcaagctgttggacccccgtttttctactatgaaaatgtggctctagctccaaagggtgtgtgggacacaatttctagatttttgtacgatattgagccagagtttgtcgactccaaatatttttgtgctgctgcaagaaaaaggggttatattcataatctgccggttgaaaatagatttcctttgtttccacttgccccacgtaccattcatgaggcacttcccctatcgaagaaatggtggccatcttgggacccacggacaaagttaaattgtttgcaaacagccattggaagtgcacaattgacgaataggattaggaaagctgtggaggactttgatggtgagccaccaatgagagttcagaagtttgttcttgatcaatgtcggaagtggaatttggtgtgggttgggagaaacaaagttgctcctttggagcctgatgaagttgaaatgctactgggatttccaaagaaccatactaggggaggtggtataagtaggaccgatagatacaagtcgcttggtaattcattccaggttgacactgtggcataccatttgtcggtattgaaagacttgtttcccggtggtatcaatgtcttatcactcttctctggaattggcggtggtgaagttgctctttatcgtcttggtattccactaaacacagtggtttctgtggaaaaatctgaagtcaacagggatattgtgagaagctggtgggagcaaactaatcagagagggaaccttatacattttaacgatgtgcagcagctgaatggagaccgcttggagcaactgatagagtcatttggaggatttgatttggtaattggtggaagcccgtgcaataaccttgcaggcagtaacagagtgagcagggatgggcttgaaggcaaagagtcttccctattttatgactatgttcggatattggacttggtcaagtccataatgtccagacataaacattag

SEQ ID NO: 632 - DNA, 744 bp, Artificial Sequence
  Synthetic Construct
cctaggtgagtctagagagttaattaagacccgggactagtccctagagtcctgctttaatgagatatgcgagacgcctatgatcgcatgatatttgctttcaattctgttgtgcacgttgtaaaaaacctgagcatgtgtagctcagatccttaccgccggtttcggttcattctaatgaatatatcacccgttactatcgtatttttatgaataatattctccgttcaatttactgattgtaccctactacttatatgtacaatattaaaatgaaaacaatatattgtgctgaataggtttatagcgacatctatgatagagcgccacaataacaaacaattgcgttttattattacaaatccaattttaaaaaaagcggcagaaccggtcaaacctaaaagactgattacataaatcttattcaaatttcaaaagtgccccaggggctagtatctacgacacaccgagcggcgaactaataacgctcactgaagggaactccggttccccgccggcgcgcatgggtgagattccttgaagttgagtattggccgtccgctctaccgaaagttacgggcaccattcaacccggtccagcacggcggccgggtaaccgacttgctgccccgagaattatgcagcatttttttggtgtatgtgggccccaaatgaagtgcaggtcaaaccttgacagtgacgacaaatcgttgggcgggtccagggcgaattttgcgacgagct

SEQ ID NO: 633 - DNA, 6 bp, Artificial Sequence
  Synthetic Construct
aagctt

SEQ ID NO: 634 - DNA, 17902 bp, Artificial Sequence
  Synthetic Construct
atgcatatgagtctagctcaacagagcttttaacccaaattggtacaatagaatacaactttagatcataattctcaaaagaaagagattccttagctattctatctgccactccatttccttctcggcttgtatgcacaagcataaaatcctcaaacttgctaagtagatactttatgtcttggataattggattgagacttgacaagcataactttcatgtaaccaaagacacaagttgctgagaatccacctcaaaaatgatcttcctataattgaatcgggataatgacagcacagcccatctaagagcctccacttctacttccagcacgcttcttacttttaccacagctcttgcacctaaccataacaccttccctgtatgatcgcgaagcacccaccctaagccacattttaatccttctgttggccatgccccatcaaagttgcacttaacccaagattgtggtggagcttcccatgtttctcgtctgtcccgacggtgttgtggttggtgctttccttacattctgagcctctttccttctaatccactcatctgcatcttcttgtgtccttactaatacctcattggttccaaattccctccctttaagcaccagctcgtttctgttcttccacagcctcccaagtatccaagggactaaagcctccacattcttcagatcaggatattcttgtttaagatgttgaactctatggaggtttgtatgaactgatgatctaggaccggataagttcccttcttcatagcgaacttattcaaagaatgttttgtgtatcattcttgttacattgttattaatgaaaaaatattattggtcattggactgaacacgagtgttaaatatggaccaggccccaaataagatccattgatatatgaattaaataacaagaataaatcgagtcaccaaaccacttgccttttttaacgagacttgttcaccaacttgatacaaaagtcattatcctatgcaaatcaataatcatacaaaaatatccaataacactaaaaaattaaaagaaatggataatttcacaatatgttatacgataaagaagttacttttccaagaaattcactgattttataagcccacttgcattagataaatggcaaaaaaaaacaaaaaggaaaagaaataaagcacgaagaattctagaaaatacgaaatacgcttcaatgcagtgggacccacggttcaattattgccaattttcagctccaccgtatatttaaaaaataaaacgataatgctaaaaaaatataaatcgtaacgatcgttaaatctcaacggctggatcttatgacgaccgttagaaattgtggttgtcgacgagtcagtaataaacggcgtcaaagtggttgcagccggcacacacgagtcgtgtttatcaactcaaagcacaaatacttttcctcaacctaaaaataaggcaattagccaaaaacaactttgcgtgtaaacaacgctcaatacacgtgtcattttattattagctattgcttcaccgccttagctttctcgtgacctagtcgtcctcgtcttttcttcttcttcttctataaaacaatacccaaagagctcttcttcttcacaattcagatttcaatttctcaaaatcttaaaaactttctctcaattctctctaccgtgatcaaggtaaatttctgtgttccttattctctcaaaatcttcgattttgttttcgttcgatcccaatttcgtatatgttctttggtttagattctgttaatcttagatcgaagacgattttctgggtttgatcgttagatatcatcttaattctcgattagggtttcatagatatcatccgatttgttcaaataatttgagttttgtcgaataattactcttcgatttgtgatttctatctagatctggtgttagtttctagtttgtgcgatcgaatttgtcgattaatctgagtttttctgattaacagggatcatcaacaagtttgtacaaaaaagcaggctctttaaagtatttttacaacaattaccaacaacaacaaacaacaaacaacattacaattactatttacaattacaaaaaaagttaccatggacaaaaaatacagcattgggttggccattgggacaaatagcgtgggttgggcagtcattacagacgaatacaaggttcctagcaagaagttcaaggtgttgggcaacactgacaggcactcgatcaagaaaaatctcattggtgcactccttttcgatagtggggagactgccgaagcgaccagactgaaaaggactgctagaaggcgctatacccggcgtaagaatcgcatttgctacctccaggagatattctctaacgaaatggccaaggttgatgacagcttctttcatcgcttggaggaatcattcctcgtcgaggaagacaagaaacacgagcggcatccgatctttggaaacattgttgatgaggtcgcatatcacgaaaagtaccccacgatctaccatcttcgcaagaaactggtggattcaactgacaaggctgatctgcggttgatatacctcgcacttgctcacatgatcaagttccgtggccattttcttattgagggagacctgaaccctgataattctgacgtcgataagttgttcatccagctcgtgcaaacatacaatcagctctttgaggaaaaccctatcaacgcctctggagttgatgccaaagcgatcctttccgcgaggctgtcgaagagtagaaggctggagaacttgatcgcccaacttcctggcgaaaagaaaaacggtttgttcgggaatctcattgcgctgagcttgggactcacgccaaacttcaagtctaacttcgacctcgcagaggatgctaaacttcagctgtccaaggatacttatgatgacgatcttgacaacctgttggcacaaatcggtgaccagtacgctgatttgttcctcgctgccaagaacctcagcgatgccatactcctttcagacatcctccgcgtgaacactgagattaccaaagcacctctgtctgcttccatgataaagcgttatgatgagcaccatcaagacctcactctgttgaaggcgttggttagacagcaactcccagagaagtacaaagaaatcttctttgaccaatctaagaatggctacgccggatatattgatggcggagcgtcccaggaggagttctacaagtttatcaaacctattcttgagaagatggatggtacggaggaactccttgttaaactgaatagagaggatctcttgcgcaagcaacggactttcgacaacggcagcataccgcaccagatccatctcggagagcttcacgccatccttcgccggcaggaagatttctacccctttctgaaggacaaccgtgagaagatcgaaaaaatccttactttcagaatcccttactatgtcggtccactggctagaggcaactctagatttgcttggatgacacgcaagagtgaggaaactatcaccccttggaacttcgaggaagtggttgacaagggcgcatcggctcaaagtttcattgagagaatgactaattttgataagaaccttccgaacgagaaagtcctgcccaagcattcactcctttacgagtatttcacagtgtataacgaacttacgaaggtgaaatacgttactgagggtatgcggaagccggcattcctgtcgggggaacaaaagaaagctatagtggatctgttgtttaaaactaacaggaaggttaccgtcaagcagcttaaggaggattacttcaagaaaatagaatgttttgactcggtggagatcagtggcgttgaagatagattcaacgcttcactgggaacctaccacgacctccttaagatcattaaggacaaagatttcttggataacgaggaaaatgaggacattctcgaagatatagtccttacactgacgttgtttgaggaccgtgaaatgatcgaggaaagattgaagacctatgctcatctcttcgacgataaggttatgaagcagctcaagcgtagaaggtacacaggttgggggcgtctttctagaaagctgattaatggcataagggataaacaatctggaaagacgattctggatttcctcaagtccgacggcttcgccaaccgcaattttatgcagcttatacacgacgattccctgactttcaaagaggacatccagaaggcccaagttagcggccaaggagattcacttcacgagcatatcgccaacctggcgggtagcccggcgatcaagaaagggattcttcagaccgtcaaggtcgtggatgagctggtgaaagttatgggccggcataagcccgaaaacatagtgatcgagatggcccgtgaaaatcagactacccaaaaaggacagaagaactcccgcgagcggatgaaaaggatagaggaaggcatcaaggaacttggaagccagatcctgaaggagcacccagttgaaaacacacagttgcaaaatgagaagctctatctttactatctccaaaatggtagagacatgtatgtggatcaggagttggacattaacaggctctcagactacgatgtcgacgctatcgtgccgcaatcgttccttaaggacgatagtatagataataaggtgctgactcggtcggataaaaaccgtggcaagtcggacaatgttcccagtgaggaagttgtgaagaagatgaagaactactggcgccaactgttgaatgcaaaattgatcacccagaggaagtttgacaacctcacaaaagcagagcgcggtgggctcagtgaacttgataaagctggattcattaagaggcaacttgttgagacacgccagattacgaagcacgtcgcgcagatactggattctaggatgaacaccaagtacgacgagaatgataaattgatcagagaagtgaaggttatcacattgaagtctaaactcgtgtccgattttcgcaaagacttccaattttataaggttcgggagatcaacaattatcaccatgcacatgatgcttacctcaacgccgtggttggtacggcgttgattaagaaatacccgaagctggagtctgagttcgtgtacggggattataaggtctacgacgtgaggaaaatgatcgctaagagtgagcaggaaattggtaaagccaccgcgaagtatttcttttactctaacatcatgaacttcttcaagacagagataacgttggcaaatggtgaaatacgtaagagacctctcatcgagactaacggtgaaaccggggaaatcgtttgggataaagggcgggactttgctactgttcgtaaggtcctctccatgccgcaagtgaatattgttaagaaaacagaggtccagacgggcggattctctaaggaatccatccttcccaaaagaaacagcgacaagctgattgcgaggaagaaagattgggaccctaagaaatatggtgggttcgattctccaaccgttgcctactccgtcttggtcgtggcgaaggttgagaagggtaaatctaagaaactcaaatccgtcaaggaactccttgggattactatcatggagaggtcttccttcgaaaagaatcctatcgatttccttgaggctaaaggctataaggaagtgaagaaggatctcatcatcaagctcccaaagtacagcctgtttgagttggaaaacggaaggaagcgcatgttggcatcagctggagagctccagaaagggaacgagctggccttgccttctaagtatgtgaacttcctctatcttgcgtcgcactacgagaagctgaaaggcagtccagaggacaacgaacagaaacaactttttgttgagcaacacaagcattatctggatgagattatagaacagatcagcgagttctcaaaaagagtcattcttgccgatgctaacctcgacaaggtgctctccgcatacaacaaacacagagacaagccgatcagggagcaggctgaaaatatcattcatctcttcactcttaccaacctgggtgcccccgcggcattcaagtattttgatacaacgattgaccggaaacgttacacaagcacgaaggaggtccttgatgcgaccctgattcatcaaagcataacagggctctatgagacgagaatcgatttgtcacagctcggcggagactacccgtatgacgtgcccgattacgctgccgcggcagctgagttcaagcgcgaggaacaggcccggaaggcgaaagtgaacaatgagaagaaaacagaaatcgttaaacctgagagctgctcaaacgagggagacgttaaggatcttaagaggaaagactctgaggatggcaacgaaggagaggaagaggaagctagctcaaaacctaagaaaccaaaggtggcactctcacatctccaagacattgacgacaccgaagcagaccaagaagaagaacccagcggcggcgggtcaggcggaggcgggagcggaggcgggggcagccccgggggcgcgccaagctatcaaacaagtttgtacaaaaaagcaggctccgcggccgcccccttcaccgagacaattcgtttgcccaaacctatgattgggtttggggttcctaccgaaccacttccagcaatggttcgaagaactcttcccgagcaagctgttggacccccgtttttctactatgaaaatgtggctctagctccaaagggtgtgtgggacacaatttctagatttttgtacgatattgagccagagtttgtcgactccaaatatttttgtgctgctgcaagaaaaaggggttatattcataatctgccggttgaaaatagatttcctttgtttccacttgccccacgtaccattcatgaggcacttcccctatcgaagaaatggtggccatcttgggacccacggacaaagttaaattgtttgcaaacagccattggaagtgcacaattgacgaataggattaggaaagctgtggaggactttgatggtgagccaccaatgagagttcagaagtttgttcttgatcaatgtcggaagtggaatttggtgtgggttgggagaaacaaagttgctcctttggagcctgatgaagttgaaatgctactgggatttccaaagaaccatactaggggaggtggtataagtaggaccgatagatacaagtcgcttggtaattcattccaggttgacactgtggcataccatttgtcggtattgaaagacttgtttcccggtggtatcaatgtcttatcactcttctctggaattggcggtggtgaagttgctctttatcgtcttggtattccactaaacacagtggtttctgtggaaaaatctgaagtcaacagggatattgtgagaagctggtgggagcaaactaatcagagagggaaccttatacattttaacgatgtgcagcagctgaatggagaccgcttggagcaactgatagagtcatttggaggatttgatttggtaattggtggaagcccgtgcaataaccttgcaggcagtaacagagtgagcagggatgggcttgaaggcaaagagtcttccctattttatgactatgttcggatattggacttggtcaagtccataatgtccagacataaacattaggtggagctcctaggtgagtctagagagttaattaagacccgggactagtccctagagtcctgctttaatgagatatgcgagacgcctatgatcgcatgatatttgctttcaattctgttgtgcacgttgtaaaaaacctgagcatgtgtagctcagatccttaccgccggtttcggttcattctaatgaatatatcacccgttactatcgtatttttatgaataatattctccgttcaatttactgattgtaccctactacttatatgtacaatattaaaatgaaaacaatatattgtgctgaataggtttatagcgacatctatgatagagcgccacaataacaaacaattgcgttttattattacaaatccaattttaaaaaaagcggcagaaccggtcaaacctaaaagactgattacataaatcttattcaaatttcaaaagtgccccaggggctagtatctacgacacaccgagcggcgaactaataacgctcactgaagggaactccggttccccgccggcgcgcatgggtgagattccttgaagttgagtattggccgtccgctctaccgaaagttacgggcaccattcaacccggtccagcacggcggccgggtaaccgacttgctgccccgagaattatgcagcatttttttggtgtatgtgggccccaaatgaagtgcaggtcaaaccttgacagtgacgacaaatcgttgggcgggtccagggcgaattttgcgacgagctcgaattcgtaatcatggtcatagctgtttcctgtgtgaaattgttatccgctcacaattccacacaacatacgagccggaagcataaagtgtaaagcctggggtgcctaatgagtgagctaactcacattaattgcgttgcgctcactgcccgctttccagtcgggaaacctgtcgtgccagctgcattaatgaatcggccaacgcgcggggagaggcggtttgcgtattggctagagcagcttgccaacatggtggagcacgacactctcgtctactccaagaatatcaaagatacagtctcagaagaccaaagggctattgagacttttcaacaaagggtaatatcgggaaacctcctcggattccattgcccagctatctgtcacttcatcaaaaggacagtagaaaaggaaggtggcacctacaaatgccatcattgcgataaaggaaaggctatcgttcaagatgcctctgccgacagtggtcccaaagatggacccccacccacgaggagcatcgtggaaaaagaagacgttccaaccacgtcttcaaagcaagtggattgatgtgataacatggtggagcacgacactctcgtctactccaagaatatcaaagatacagtctcagaagaccaaagggctattgagacttttcaacaaagggtaatatcgggaaacctcctcggattccattgcccagctatctgtcacttcatcaaaaggacagtagaaaaggaaggtggcacctacaaatgccatcattgcgataaaggaaaggctatcgttcaagatgcctctgccgacagtggtcccaaagatggacccccacccacgaggagcatcgtggaaaaagaagacgttccaaccacgtcttcaaagcaagtggattgatgtgatatctccactgacgtaagggatgacgcacaatcccactatccttcgcaagaccttcctctatataaggaagttcatttcatttggagaggacacgctgaaatcaccagtctctctctacaaatctatctctctcgagtctaccatgagcccagaacgacgcccggccgacatccgccgtgccaccgaggcggacatgccggcggtctgcaccatcgtcaaccactacatcgagacaagcacggtcaacttccgtaccgagccgcaggaaccgcaggagtggacggacgacctcgtccgtctgcgggagcgctatccctggctcgtcgccgaggtggacggcgaggtcgccggcatcgcctacgcgggcccctggaaggcacgcaacgcctacgactggacggccgagtcgaccgtgtacgtctccccccgccaccagcggacgggactgggctccacgctctacacccacctgctgaagtccctggaggcacagggcttcaagagcgtggtcgctgtcatcgggctgcccaacgacccgagcgtgcgcatgcacgaggcgctcggatatgccccccgcggcatgctgcgggcggccggcttcaagcacgggaactggcatgacgtgggtttctggcagctggacttcagcctgccggtaccgccccgtccggtcctgcccgtcaccgagatttgactcgagtttctccataataatgtgtgagtagttcccagataagggaattagggttcctatagggtttcgctcatgtgttgagcatataagaaacccttagtatgtatttgtatttgtaaaatacttctatcaataaaatttctaattcctaaaaccaaaatccagtactaaaatccagatcccccgaattaattcggcgttaattcagtacattaaaaacgtccgcaatgtgttattaagttgtctaagcgtcaatttgtttacaccacaatatatcctgccaccagccagccaacagctccccgaccggcagctcggcacaaaatcaccactcgatacaggcagcccatcagtccgggacggcgtcagcgggagagccgttgtaaggcggcagactttgctcatgttaccgatgctattcggaagaacggcaactaagctgccgggtttgaaacacggatgatctcgcggagggtagcatgttgattgtaacgatgacagagcgttgctgcctgtgatcaccgcggtttcaaaatcggctccgtcgatactatgttatacgccaactttgaaaacaactttgaaaaagctgttttctggtatttaaggttttagaatgcaaggaacagtgaattggagttcgtcttgttataattagcttcttggggtatctttaaatactgtagaaaagaggaaggaaataataaatggctaaaatgagaatatcaccggaattgaaaaaactgatcgaaaaataccgctgcgtaaaagatacggaaggaatgtctcctgctaaggtatataagctggtgggagaaaatgaaaacctatatttaaaaatgacggacagccggtataaagggaccacctatgatgtggaacgggaaaaggacatgatgctatggctggaaggaaagctgcctgttccaaaggtcctgcactttgaacggcatgatggctggagcaatctgctcatgagtgaggccgatggcgtcctttgctcggaagagtatgaagatgaacaaagccctgaaaagattatcgagctgtatgcggagtgcatcaggctctttcactccatcgacatatcggattgtccctatacgaatagcttagacagccgcttagccgaattggattacttactgaataacgatctggccgatgtggattgcgaaaactgggaagaagacactccatttaaagatccgcgcgagctgtatgattttttaaagacggaaaagcccgaagaggaacttgtcttttcccacggcgacctgggagacagcaacatctttgtgaaagatggcaaagtaagtggctttattgatcttgggagaagcggcagggcggacaagtggtatgacattgccttctgcgtccggtcgatcagggaggatatcggggaagaacagtatgtcgagctattttttgacttactggggatcaagcctgattgggagaaaataaaatattatattttactggatgaattgttttagtacctagaatgcatgaccaaaatcccttaacgtgagttttcgttccactgagcgtcagaccccgtagaaaagatcaaaggatcttcttgagatcctttttttctgcgcgtaatctgctgcttgcaaacaaaaaaaccaccgctaccagcggtggtttgtttgccggatcaagagctaccaactctttttccgaaggtaactggcttcagcagagcgcagataccaaatactgtccttctagtgtagccgtagttaggccaccacttcaagaactctgtagcaccgcctacatacctcgctctgctaatcctgttaccagtggctgctgccagtggcgataagtcgtgtcttaccgggttggactcaagacgatagttaccggataaggcgcagcggtcgggctgaacggggggttcgtgcacacagcccagcttggagcgaacgacctacaccgaactgagatacctacagcgtgagctatgagaaagcgccacgcttcccgaagggagaaaggcggacaggtatccggtaagcggcagggtcggaacaggagagcgcacgagggagcttccagggggaaacgcctggtatctttatagtcctgtcgggtttcgccacctctgacttgagcgtcgatttttgtgatgctcgtcaggggggcggagcctatggaaaaacgccagcaacgcggcctttttacggttcctggccttttgctggccttttgctcacatgttctttcctgcgttatcccctgattctgtggataaccgtattaccgcctttgagtgagctgataccgctcgccgcagccgaacgaccgagcgcagcgagtcagtgagcgaggaagcggaagagcgcctgatgcggtattttctccttacgcatctgtgcggtatttcacaccgcatatggtgcactctcagtacaatctgctctgatgccgcatagttaagccagtatacactccgctatcgctacgtgactgggtcatggctgcgccccgacacccgccaacacccgctgacgcgccctgacgggcttgtctgctcccggcatccgcttacagacaagctgtgaccgtctccgggagctgcatgtgtcagaggttttcaccgtcatcaccgaaacgcgcgaggcagggtgccttgatgtgggcgccttatttgccgactaccttggtgatctcgcctttcacgtagtggacaaattcttccaactgatctgcgcgcgaggccaagcgatcttcttcttgtccaagataagcctgtctagcttcaagtatgacgggctgatactgggccggcaggcgctccattgcccagtcggcagcgacatccttcggcgcgattttgccggttactgcgctgtaccaaatgcgggacaacgtaagcactacatttcgctcatcgccagcccagtcgggcggcgagttccatagcgttaaggtttcatttagcgcctcaaatagatcctgttcaggaaccggatcaaagagttcctccgccgctggacctaccaaggcaacgctatgttctcttgcttttgtcagcaagatagccagatcaatgtcgatcgtggctggctcgaagatacctgcaagaatgtcattgcgctgccattctccaaattgcagttcgcgcttagctggataacgccacggaatgatgtcgtcgtgcacaacaatggtgacttctacagcgcggagaatctcgctctctccaggggaagccgaagtttccaaaaggtcgttgatcaaagctcgccgcgttgtttcatcaagccttacggtcaccgtaaccagcaaatcaatatcactgtgtggcttcaggccgccatccactgcggagccgtacaaatgtacggccagcaacgtcggttcgagatggcgctcgatgacgccaactacctctgatagttgagtcgatacttcggcgatcaccgcttccctcatgatgtttaactttgttttagggcgactgccctgctgcgtaacatcgttgctgctccataacatcaaacatcgacccacggcgtaacgcgcttgctgcttggatgcccgaggcatagactgtaccccaaaaaaacagtcataacaagccatgaaaaccgccactgcgccgttaccaccgctgcgttcggtcaaggttctggaccagttgcgtgagcgcatggcgccggcggtcgagggcggtcgagtggcgacggcgcggcttgtccgcgccctggtagattgcctggccgtaggccagccatttttgagcggccagcggccgcgataggccgacgcgaagcggcggggcgtagggagcgcagcgaccgaagggtaggcgctttttgcagctcttcggctgtgcgctggccagacagttatgcacaggccaggcgggttttaagagttttaataagttttaaagagttttaggcggaaaaatcgccttttttctcttttatatcagtcacttacatgtgtgaccggttcccaatgtacggctttgggttcccaatgtacgggttccggttcccaatgtacggctttgggttcccaatgtacgtgctatccacaggaaagagaccttttcgacctttttcccctgctagggcaatttgccctagcatctgctccgtacattaggaaccggcggatgcttcgccctcgatcaggttgcggtagcgcatgactaggatcgggccagcctgccccgcctcctccttcaaatcgtactccggcaggtcatttgacccgatcagcttgcgcacggtgaaacagaacttcttgaactctccggcgctgccactgcgttcgtagatcgtcttgaacaaccatctggcttctgccttgcctgcggcgcggcgtgccaggcggtagagaaaacggccgatgccgggatcgatcaaaaagtaatcggggtgaaccgtcagcacgtccgggttcttgccttctgtgatctcgcggtacatccaatcagctagctcgatctcgatgtactccggccgcccggtttcgctctttacgatcttgtagcggctaatcaaggcttcaccctcggataccgtcaccaggcggccgttcttggccttcttcgtacgctgcatggcaacgtgcgtggtgtttaaccgaatgcaggtttctaccaggtcgtctttctgctttccgccatcggctcgccggcagaacttgagtacgtccgcaacgtgtggacggaacacgcggccgggcttgtctcccttcccttcccggtatcggttcatggattcggttagatgggaaaccgccatcagtaccaggtcgtaatcccacacactggccatgccggccggccctgcggaaacctctacgtgcccgtctggaagctcgtagcggatcacctcgccagctcgtcggtcacgcttcgacagacggaaaacggccacgtccatgatgctgcgactatcgcgggtgcccacgtcatagagcatcggaacgaaaaaatctggttgctcgtcgcccttgggcggcttcctaatcgacggcgcaccggctgccggcggttgccgggattctttgcggattcgatcagcggccgcttgccacgattcaccggggcgtgcttctgcctcgatgcgttgccgctgggcggcctgcgcggccttcaacttctccaccaggtcatcacccagcgccgcgccgatttgtaccgggccggatggtttgcgaccgtcacgccgattcctcgggcttgggggttccagtgccattgcagggccggcagacaacccagccgcttacgcctggccaaccgcccgttcctccacacatggggcattccacggcgtcggtgcctggttgttcttgattttccatgccgcctcctttagccgctaaaattcatctactcatttattcatttgctcatttactctggtagctgcgcgatgtattcagatagcagctcggtaatggtcttgccttggcgtaccgcgtacatcttcagcttggtgtgatcctccgccggcaactgaaagttgacccgcttcatggctggcgtgtctgccaggctggccaacgttgcagccttgctgctgcgtgcgctcggacggccggcacttagcgtgtttgtgcttttgctcattttctctttacctcattaactcaaatgagttttgatttaatttcagcggccagcgcctggacctcgcgggcagcgtcgccctcgggttctgattcaagaacggttgtgccggcggcggcagtgcctgggtagctcacgcgctgcgtgatacgggactcaagaatgggcagctcgtacccggccagcgcctcggcaacctcaccgccgatgcgcgtgcctttgatcgcccgcgacacgacaaaggccgcttgtagccttccatccgtgacctcaatgcgctgcttaaccagctccaccaggtcggcggtggcccatatgtcgtaagggcttggctgcaccggaatcagcacgaagtcggctgccttgatcgcggacacagccaagtccgccgcctggggcgctccgtcgatcactacgaagtcgcgccggccgatggccttcacgtcgcggtcaatcgtcgggcggtcgatgccgacaacggttagcggttgatcttcccgcacggccgcccaatcgcgggcactgccctggggatcggaatcgactaacagaacatcggccccggcgagttgcagggcgcgggctagatgggttgcgatggtcgtcttgcctgacccgcctttctggttaagtacagcgataaccttcatgcgttccccttgcgtatttgtttatttactcatcgcatcatatacgcagcgaccgcatgacgcaagctgttttactcaaatacacatcacctttttagacggcggcgctcggtttcttcagcggccaagctggccggccaggccgccagcttggcatcagacaaaccggccaggatttcatgcagccgcacggttgagacgtgcgcgggcggctcgaacacgtacccggccgcgatcatctccgcctcgatctcttcggtaatgaaaaacggttcgtcctggccgtcctggtgcggtttcatgcttgttcctcttggcgttcattctcggcggccgccagggcgtcggcctcggtcaatgcgtcctcacggaaggcaccgcgccgcctggcctcggtgggcgtcacttcctcgctgcgctcaagtgcgcggtacagggtcgagcgatgcacgccaagcagtgcagccgcctctttcacggtgcggccttcctggtcgatcagctcgcgggcgtgcgcgatctgtgccggggtgagggtagggcgggggccaaacttcacgcctcgggccttggcggcctcgcgcccgctccgggtgcggtcgatgattagggaacgctcgaactcggcaatgccggcgaacacggtcaacaccatgcggccggccggcgtggtggtgtcggcccacggctctgccaggctacgcaggcccgcgccggcctcctggatgcgctcggcaatgtccagtaggtcgcgggtgctgcgggccaggcggtctagcctggtcactgtcacaacgtcgccagggcgtaggtggtcaagcatcctggccagctccgggcggtcgcgcctggtgccggtgatcttctcggaaaacagcttggtgcagccggccgcgtgcagttcggcccgttggttggtcaagtcctggtcgtcggtgctgacgcgggcatagcccagcaggccagcggcggcgctcttgttcatggcgtaatgtctccggttctagtcgcaagtattctactttatgcgactaaaacacgcgacaagaaaacgccaggaaaagggcagggcggcagcctgtcgcgtaacttaggacttgtgcgacatgtcgttttcagaagacggctgcactgaacgtcagaagccgactgcactatagcagcggaggggttggatcaaagtactttgatcccgaggggaaccctgtggttggcatgcacatacaaatggacgaacggataaaccttttcacgcccttttaaatatccgttattctaataaacgctcttttctcttaggtttacccgccaatatatcctgtcaaacactgatagtttaaactgaaggcgggaaacgacaatctgatccaagctcaagctgctctagcattcgccattcaggctgcgcaactgttgggaagggcgatcggtgcgggcctcttcgctattacgccagctggcgaaagggggatgtgctgcaaggcgattaagttgggtaacgccagggttttcccagtcacgacgttgtaaaacgacggccagtgccaagcttgcatgcctgcaggtcgactctagaggatccccgggtaccgggccccccctcgaggcgcgcc

SEQ ID NO: 635 - DNA, 473 bp, Artificial Sequence
  Synthetic Construct
ggccgcaatattacaacttgtttaagctttcgttgaacaacggaaactcgacttgccttccgcacaatacatcatttcttcttagctttttttcttcttcttcgttcatacagtttttttttgtttatcagcttacattttcttgaaccgtagctttcgttttcttctttttaactttccattcggagtttttgtatcttgtttcatagtttgtcccaggattagaatgattaggcatcgaaccttcaagaatttgattgaataaaacatcttcattcttaagatatgaagataatcttcaaaaggcccctgggaatctgaaagaagagaagcaggcccatttatatgggaaagaacaatagtatttcttatataggcccatttaagttgaaaacaatcttcaaaagtcccacatcgcttagataagaaaacgaagctgagtttatatacagctagagtcgaagtagtgattg

SEQ ID NO: 636 - DNA, 77 bp, Artificial Sequence
  Synthetic Construct
aacaaagcaccagtggtctagtggtagaatagtaccctgccacggtacagacccgggttcgattcccggctggtgca

SEQ ID NO: 637 - DNA, 21 bp, Artificial Sequence
  Synthetic Construct
gacggaaagatgtatgggctt

SEQ ID NO: 638 - DNA, 76 bp, Artificial Sequence
  Synthetic Construct
gttttagagctagaaatagcaagttaaaataaggctagtccgttatcaacttgaaaaagtggcaccgagtcggtgc

SEQ ID NO: 639 - DNA, 77 bp, Artificial Sequence; identical to SEQ ID NO: 636
  Synthetic Construct

SEQ ID NO: 640 - DNA, 19 bp, Artificial Sequence
  Synthetic Construct
aaactaggccatccatgga

SEQ ID NO: 641 - DNA, 7 bp, Artificial Sequence
  Synthetic Construct
ttttttt

SEQ ID NO: 642 - DNA, 793 bp, Artificial Sequence
  Synthetic Construct
ggccgcaatattacaacttgtttaagctttcgttgaacaacggaaactcgacttgccttccgcacaatacatcatttcttcttagctttttttcttcttcttcgttcatacagtttttttttgtttatcagcttacattttcttgaaccgtagctttcgttttcttctttttaactttccattcggagtttttgtatcttgtttcatagtttgtcccaggattagaatgattaggcatcgaaccttcaagaatttgattgaataaaacatcttcattcttaagatatgaagataatcttcaaaaggcccctgggaatctgaaagaagagaagcaggcccatttatatgggaaagaacaatagtatttcttatataggcccatttaagttgaaaacaatcttcaaaagtcccacatcgcttagataagaaaacgaagctgagtttatatacagctagagtcgaagtagtgattgaacaaagcaccagtggtctagtggtagaatagtaccctgccacggtacagacccgggttcgattcccggctggtgcagacggaaagatgtatgggcttgttttagagctagaaatagcaagttaaaataaggctagtccgttatcaacttgaaaaagtggcaccgagtcggtgcgtttaacaaagcaccagtggtctagtggtagaatagtaccctgccacggtacagacccgggttcgattcccggctggtgcaaaactaggccatccatggagtttaaacaaacaaactttttttaaaccaccccgtgtcaacgcggc

SEQ ID NO: 643 - DNA, 473 bp, Artificial Sequence; identical to SEQ ID NO: 635
  Synthetic Construct

SEQ ID NO: 644 - DNA, 77 bp, Artificial Sequence; identical to SEQ ID NO: 636
  Synthetic Construct

SEQ ID NO: 645 - DNA, 20 bp, Artificial Sequence
  Synthetic Construct
gcggcgcaagatctgatatt

SEQ ID NO: 646 - DNA, 76 bp, Artificial Sequence; identical to SEQ ID NO: 638
  Synthetic Construct

SEQ ID NO: 647 - DNA, 77 bp, Artificial Sequence; identical to SEQ ID NO: 636
  Synthetic Construct

SEQ ID NO: 648 - DNA, 20 bp, Artificial Sequence
  Synthetic Construct
ccattggtccaagtgctatt

SEQ ID NO: 649 - DNA, 76 bp, Artificial Sequence; identical to SEQ ID NO: 638
  Synthetic Construct

SEQ ID NO: 650 - DNA, 77 bp, Artificial Sequence; identical to SEQ ID NO: 636
  Synthetic Construct

SEQ ID NO: 651 - DNA, 20 bp, Artificial Sequence
  Synthetic Construct
attctcgacggaaagatgta

SEQ ID NO: 652 - DNA, 76 bp, Artificial Sequence; identical to SEQ ID NO: 638
  Synthetic Construct

SEQ ID NO: 653 - DNA, 77 bp, Artificial Sequence; identical to SEQ ID NO: 636
  Synthetic Construct

SEQ ID NO: 654 - DNA, 20 bp, Artificial Sequence
  Synthetic Construct
aaaactaggccatccatgga

SEQ ID NO: 655 - DNA, 76 bp, Artificial Sequence; identical to SEQ ID NO: 638
  Synthetic Construct

SEQ ID NO: 656 - DNA, 7 bp, Artificial Sequence
  Synthetic Construct
ttttttt

SEQ ID NO: 657 - DNA, 1223 bp, Artificial Sequence
  Synthetic Construct
ggccgcaatattacaacttgtttaagctttcgttgaacaacggaaactcgacttgccttccgcacaatacatcatttcttcttagctttttttcttcttcttcgttcatacagtttttttttgtttatcagcttacattttcttgaaccgtagctttcgttttcttctttttaactttccattcggagtttttgtatcttgtttcatagtttgtcccaggattagaatgattaggcatcgaaccttcaagaatttgattgaataaaacatcttcattcttaagatatgaagataatcttcaaaaggcccctgggaatctgaaagaagagaagcaggcccatttatatgggaaagaacaatagtatttcttatataggcccatttaagttgaaaacaatcttcaaaagtcccacatcgcttagataagaaaacgaagctgagtttatatacagctagagtcgaagtagtgattgaacaaagcaccagtggtctagtggtagaatagtaccctgccacggtacagacccgggttcgattcccggctggtgcagcggcgcaagatctgatattgttttagagctagaaatagcaagttaaaataaggctagtccgttatcaacttgaaaaagtggcaccgagtcggtgcgtttaacaaagcaccagtggtctagtggtagaatagtaccctgccacggtacagacccgggttcgattcccggctggtgcaccattggtccaagtgctattgttttagagctagaaatagcaagttaaaataaggctagtccgttatcaacttgaaaaagtggcaccgagtcggtgcgtttaacaaagcaccagtggtctagtggtagaatagtaccctgccacggtacagacccgggttcgattcccggctggtgcaattctcgacggaaagatgtagttttagagctagaaatagcaagttaaaataaggctagtccgttatcaacttgaaaaagtggcaccgagtcggtgcgtttaacaaagcaccagtggtctagtggtagaatagtaccctgccacggtacagacccgggttcgattcccggctggtgcaaaaactaggccatccatggagttttagagctagaaatagcaagttaaaataaggctagtccgttatcaacttgaaaaagtggcaccgagtcggtgcgtttaaacaaacaaactttttttaaaccaccccgtgtcaacgcggc

SEQ ID NO: 658 - DNA, 1992 bp, Artificial Sequence
  Synthetic Construct
agtctagctcaacagagcttttaacccaaattggtacaatagaatacaactttagatcataattctcaaaagaaagagattccttagctattctatctgccactccatttccttctcggcttgtatgcacaagcataaaatcctcaaacttgctaagtagatactttatgtcttggataattggattgagacttgacaagcataactttcatgtaaccaaagacacaagttgctgagaatccacctcaaaaatgatcttcctataattgaatcgggataatgacagcacagcccatctaagagcctccacttctacttccagcacgcttcttacttttaccacagctcttgcacctaaccataacaccttccctgtatgatcgcgaagcacccaccctaagccacattttaatccttctgttggccatgccccatcaaagttgcacttaacccaagattgtggtggagcttcccatgtttctcgtctgtcccgacggtgttgtggttggtgctttccttacattctgagcctctttccttctaatccactcatctgcatcttcttgtgtccttactaatacctcattggttccaaattccctccctttaagcaccagctcgtttctgttcttccacagcctcccaagtatccaagggactaaagcctccacattcttcagatcaggatattcttgtttaagatgttgaactctatggaggtttgtatgaactgatgatctaggaccggataagttcccttcttcatagcgaacttattcaaagaatgttttgtgtatcattcttgttacattgttattaatgaaaaaatattattggtcattggactgaacacgagtgttaaatatggaccaggccccaaataagatccattgatatatgaattaaataacaagaataaatcgagtcaccaaaccacttgccttttttaacgagacttgttcaccaacttgatacaaaagtcattatcctatgcaaatcaataatcatacaaaaatatccaataacactaaaaaattaaaagaaatggataatttcacaatatgttatacgataaagaagttacttttccaagaaattcactgattttataagcccacttgcattagataaatggcaaaaaaaaacaaaaaggaaaagaaataaagcacgaagaattctagaaaatacgaaatacgcttcaatgcagtgggacccacggttcaattattgccaattttcagctccaccgtatatttaaaaaataaaacgataatgctaaaaaaatataaatcgtaacgatcgttaaatctcaacggctggatcttatgacgaccgttagaaattgtggttgtcgacgagtcagtaataaacggcgtcaaagtggttgcagccggcacacacgagtcgtgtttatcaactcaaagcacaaatacttttcctcaacctaaaaataaggcaattagccaaaaacaactttgcgtgtaaacaacgctcaatacacgtgtcattttattattagctattgcttcaccgccttagctttctcgtgacctagtcgtcctcgtcttttcttcttcttcttctataaaacaatacccaaagagctcttcttcttcacaattcagatttcaatttctcaaaatcttaaaaactttctctcaattctctctaccgtgatcaaggtaaatttctgtgttccttattctctcaaaatcttcgattttgttttcgttcgatcccaatttcgtatatgttctttggtttagattctgttaatcttagatcgaagacgattttctgggtttgatcgttagatatcatcttaattctcgattagggtttcatagatatcatccgatttgttcaaataatttgagttttgtcgaataattactcttcgatttgtgatttctatctagatctggtgttagtttctagtttgtgcgatcgaatttgtcgattaatctgagtttttctgattaacagacgcgt

SEQ ID NO: 659 - DNA, 630 bp, Artificial Sequence
  Synthetic Construct
ccatggttgggtaccaacaaatggctggtggacttaacgatatcttcgaagctcagaagattgaatggcatgaggatactggtggatctagcatccccggacttgaggttcttttccaaggacctctcgagccttataaatgccctgagtgtggaaaatctttctctcaatctggagatcttaggaggcaccaaaggacccataccggtgaaaaaccttataaatgccctgagtgtggaaaatcattcagtaggagtgatcatcttaccacccatcagaggacccatactggtgaaaaaccttataaatgccctgagtgtggaaaatcattctcacaatcttcatctcttgttaggcatcagaggactcataccggagaaaaaccttataaatgccctgagtgtggaaaatcattctcaacatctggaaaccttgttaggcaccaaaggacccatactggtgaaaaaccttataaatgccctgagtgtggaaaatcattctctcagagagcaaaccttagggctcatcaaaggacacacactggagaaaaaccttataaatgccctgagtgtggaaaatctttctctaggagtgataagctcaccgagcatcaaaggactcacaccggac

SEQ ID NO: 660 - DNA, 97 bp, Artificial Sequence
  Synthetic Construct
tcgaggactacaaagacgatgacgacaaagactacaaagacgatgacgacaaagactacaaagacgatgacgacaaaaagcttgatatcgccatggg

SEQ ID NO: 661 - DNA, 1161 bp, Artificial Sequence
  Synthetic Construct
atgtcaaaagtagaaaacaaaacgaaaaagctaagggtattcgaagctttcgcggggataggggcgcaaaggaaggcactagaaaaagtccgtaaggacgagtatgagatcgtcgggcttgccgagtggtatgttcctgcaatagtgatgtaccaagcaatccacaataattttcacacgaaactagaatataagtcagtctcaagggaagagatgatcgactatctggagaacaagacgctgtcctggaactctaaaaatcctgtatcaaacggatactggaagcgaaagaaggacgacgaacttaagattatatacaacgcgattaaattatcagaaaaagagggaaatatcttcgacattagggatttgtacaaaagaaccctcaagaatattgatttgctcacctatagtttcccgtgtcaagacctgtcccaacagggcatacaaaaaggcatgaaacgtggcagcggtacaagaagtggactcctgtgggaaattgagagggctctagatagcacagagaaaaacgatttaccaaaatatctactcatggagaacgtgggcgccctgcttcataaaaaaaacgaggaagaattgaatcagtggaaacaaaagctggaatctttaggttatcagaactcaatcgaagttttgaacgccgccgatttcggttcctcacaagcacgaagaagggtttttatgatttccactcttaatgagttcgttgaacttccgaagggtgataaaaaacccaaaagtatcaaaaaagtcctcaataagatagtctcagagaaagatattctaaataaccttctgaaatataacttaactgagttcaagaaaacgaaatctaatatcaataaagccagtcttatagggtattctaagttcaactctgaaggatacgtgtatgaccccgagtttacgggaccgacgttaactgcttccggcgcaaattcacgaatcaagatcaaggatggttccaatatccgtaaaatgaactctgatgagacgtttttgtacattggattcgactcacaagacggaaagagggtcaatgagatcgagtttctaaccgaaaaccaaaagatttttgtttgtggaaactccatttctgtagaagtcctggaagcaatcattgataaaatagggggataa

SEQ ID NO: 662 - DNA, 739 bp, Artificial Sequence
  Synthetic Construct
ctaggtgagtctagagagttaattaagacccgggactagtccctagagtcctgctttaatgagatatgcgagacgcctatgatcgcatgatatttgctttcaattctgttgtgcacgttgtaaaaaacctgagcatgtgtagctcagatccttaccgccggtttcggttcattctaatgaatatatcacccgttactatcgtatttttatgaataatattctccgttcaatttactgattgtaccctactacttatatgtacaatattaaaatgaaaacaatatattgtgctgaataggtttatagcgacatctatgatagagcgccacaataacaaacaattgcgttttattattacaaatccaattttaaaaaaagcggcagaaccggtcaaacctaaaagactgattacataaatcttattcaaatttcaaaagtgccccaggggctagtatctacgacacaccgagcggcgaactaataacgctcactgaagggaactccggttccccgccggcgcgcatgggtgagattccttgaagttgagtattggccgtccgctctaccgaaagttacgggcaccattcaacccggtccagcacggcggccgggtaaccgacttgctgccccgagaattatgcagcatttttttggtgtatgtgggccccaaatgaagtgcaggtcaaaccttgacagtgacgacaaatcgttgggcgggtccagggcgaattttgcgacg

SEQ ID NO: 663 - DNA, 4782 bp, Artificial Sequence
  Synthetic Construct
agtctagctcaacagagcttttaacccaaattggtacaatagaatacaactttagatcataattctcaaaagaaagagattccttagctattctatctgccactccatttccttctcggcttgtatgcacaagcataaaatcctcaaacttgctaagtagatactttatgtcttggataattggattgagacttgacaagcataactttcatgtaaccaaagacacaagttgctgagaatccacctcaaaaatgatcttcctataattgaatcgggataatgacagcacagcccatctaagagcctccacttctacttccagcacgcttcttacttttaccacagctcttgcacctaaccataacaccttccctgtatgatcgcgaagcacccaccctaagccacattttaatccttctgttggccatgccccatcaaagttgcacttaacccaagattgtggtggagcttcccatgtttctcgtctgtcccgacggtgttgtggttggtgctttccttacattctgagcctctttccttctaatccactcatctgcatcttcttgtgtccttactaatacctcattggttccaaattccctccctttaagcaccagctcgtttctgttcttccacagcctcccaagtatccaagggactaaagcctccacattcttcagatcaggatattcttgtttaagatgttgaactctatggaggtttgtatgaactgatgatctaggaccggataagttcccttcttcatagcgaacttattcaaagaatgttttgtgtatcattcttgttacattgttattaatgaaaaaatattattggtcattggactgaacacgagtgttaaatatggaccaggccccaaataagatccattgatatatgaattaaataacaagaataaatcgagtcaccaaaccacttgccttttttaacgagacttgttcaccaacttgatacaaaagtcattatcctatgcaaatcaataatcatacaaaaatatccaataacactaaaaaattaaaagaaatggataatttcacaatatgttatacgataaagaagttacttttccaagaaattcactgattttataagcccacttgcattagataaatggcaaaaaaaaacaaaaaggaaaagaaataaagcacgaagaattctagaaaatacgaaatacgcttcaatgcagtgggacccacggttcaattattgccaattttcagctccaccgtatatttaaaaaataaaacgataatgctaaaaaaatataaatcgtaacgatcgttaaatctcaacggctggatcttatgacgaccgttagaaattgtggttgtcgacgagtcagtaataaacggcgtcaaagtggttgcagccggcacacacgagtcgtgtttatcaactcaaagcacaaatacttttcctcaacctaaaaataaggcaattagccaaaaacaactttgcgtgtaaacaacgctcaatacacgtgtcattttattattagctattgcttcaccgccttagctttctcgtgacctagtcgtcctcgtcttttcttcttcttcttctataaaacaatacccaaagagctcttcttcttcacaattcagatttcaatttctcaaaatcttaaaaactttctctcaattctctctaccgtgatcaaggtaaatttctgtgttccttattctctcaaaatcttcgattttgttttcgttcgatcccaatttcgtatatgttctttggtttagattctgttaatcttagatcgaagacgattttctgggtttgatcgttagatatcatcttaattctcgattagggtttcatagatatcatccgatttgttcaaataatttgagttttgtcgaataattactcttcgatttgtgatttctatctagatctggtgttagtttctagtttgtgcgatcgaatttgtcgattaatctgagtttttctgattaacagacgcgtccatggttgggtaccaacaaatggctggtggacttaacgatatcttcgaagctcagaagattgaatggcatgaggatactggtggatctagcatccccggacttgaggttcttttccaaggacctctcgagccttataaatgccctgagtgtggaaaatctttctctcaatctggagatcttaggaggcaccaaaggacccataccggtgaaaaaccttataaatgccctgagtgtggaaaatcattcagtaggagtgatcatcttaccacccatcagaggacccatactggtgaaaaaccttataaatgccctgagtgtggaaaatcattctcacaatcttcatctcttgttaggcatcagaggactcataccggagaaaaaccttataaatgccctgagtgtggaaaatcattctcaacatctggaaaccttgttaggcaccaaaggacccatactggtgaaaaaccttataaatgccctgagtgtggaaaatcattctctcagagagcaaaccttagggctcatcaaaggacacacactggagaaaaaccttataaatgccctgagtgtggaaaatctttctctaggagtgataagctcaccgagcatcaaaggactcacaccggactcgaggactacaaagacgatgacgacaaagactacaaagacgatgacgacaaagactacaaagacgatgacgacaaaaagcttgatatcgccatggggggcgcgccaagctatcaaacaagtttgtacaaaaaagcaggctccgcggccgcccccttcaccatgtcaaaagtagaaaacaaaacgaaaaagctaagggtattcgaagctttcgcggggataggggcgcaaaggaaggcactagaaaaagtccgtaaggacgagtatgagatcgtcgggcttgccgagtggtatgttcctgcaatagtgatgtaccaagcaatccacaataattttcacacgaaactagaatataagtcagtctcaagggaagagatgatcgactatctggagaacaagacgctgtcctggaactctaaaaatcctgtatcaaacggatactggaagcgaaagaaggacgacgaacttaagattatatacaacgcgattaaattatcagaaaaagagggaaatatcttcgacattagggatttgtacaaaagaaccctcaagaatattgatttgctcacctatagtttcccgtgtcaagacctgtcccaacagggcatacaaaaaggcatgaaacgtggcagcggtacaagaagtggactcctgtgggaaattgagagggctctagatagcacagagaaaaacgatttaccaaaatatctactcatggagaacgtgggcgccctgcttcataaaaaaaacgaggaagaattgaatcagtggaaacaaaagctggaatctttaggttatcagaactcaatcgaagttttgaacgccgccgatttcggttcctcacaagcacgaagaagggtttttatgatttccactcttaatgagttcgttgaacttccgaagggtgataaaaaacccaaaagtatcaaaaaagtcctcaataagatagtctcagagaaagatattctaaataaccttctgaaatataacttaactgagttcaagaaaacgaaatctaatatcaataaagccagtcttatagggtattctaagttcaactctgaaggatacgtgtatgaccccgagtttacgggaccgacgttaactgcttccggcgcaaattcacgaatcaagatcaaggatggttccaatatccgtaaaatgaactctgatgagacgtttttgtacattggattcgactcacaagacggaaagagggtcaatgagatcgagtttctaaccgaaaaccaaaagatttttgtttgtggaaactccatttctgtagaagtcctggaagcaatcattgataaaatagggggataaaagggtgggcgcgccgacccagctttcttgtacaaagtggttcgataattccttaattaactagttctagagcggccgccaccgcggtggagctcctaggtgagtctagagagttaattaagacccgggactagtccctagagtcctgctttaatgagatatgcgagacgcctatgatcgcatgatatttgctttcaattctgttgtgcacgttgtaaaaaacctgagcatgtgtagctcagatccttaccgccggtttcggttcattctaatgaatatatcacccgttactatcgtatttttatgaataatattctccgttcaatttactgattgtaccctactacttatatgtacaatattaaaatgaaaacaatatattgtgctgaataggtttatagcgacatctatgatagagcgccacaataacaaacaattgcgttttattattacaaatccaattttaaaaaaagcggcagaaccggtcaaacctaaaagactgattacataaatcttattcaaatttcaaaagtgccccaggggctagtatctacgacacaccgagcggcgaactaataacgctcactgaagggaactccggttccccgccggcgcgcatgggtgagattccttgaagttgagtattggccgtccgctctaccgaaagttacgggcaccattcaacccggtccagcacggcggccgggtaaccgacttgctgccccgagaattatgcagcatttttttggtgtatgtgggccccaaatgaagtgcaggtcaaaccttgacagtgacgacaaatcgttgggcgggtccagggcgaattttgcgacgagct

SEQ ID NO: 664 - DNA, 1992 bp, Artificial Sequence; identical to SEQ ID NO: 658
  Synthetic Construct

SEQ ID NO: 665 - DNA, 630 bp, Artificial Sequence; identical to SEQ ID NO: 659
  Synthetic Construct

SEQ ID NO: 666 - DNA, 97 bp, Artificial Sequence; identical to SEQ ID NO: 660
  Synthetic Construct

SEQ ID NO: 667 - DNA, 1065 bp, Artificial Sequence
  Synthetic Construct
gagacaattcgtttgcccaaacctatgattgggtttggggttcctaccgaaccacttccagcaatggttcgaagaactcttcccgagcaagctgttggacccccgtttttctactatgaaaatgtggctctagctccaaagggtgtgtgggacacaatttctagatttttgtacgatattgagccagagtttgtcgactccaaatatttttgtgctgctgcaagaaaaaggggttatattcataatctgccggttgaaaatagatttcctttgtttccacttgccccacgtaccattcatgaggcacttcccctatcgaagaaatggtggccatcttgggatccacggacaaagttaaattgtttgcaaacagccattggaagtgcacaattgacgaataggattaggaaagctgtggaggactttgatggtgagccaccaatgagagttcagaagtttgttcttgatcaatgtcggaagtggaatttggtgtgggttgggagaaacaaagttgctcctttggagcctgatgaagttgaaatgctactgggatttccaaagaaccatactaggggaggtggtataagtaggaccgatagatacaagtcgcttggtaattcattccaggttgacactgtggcataccatttgtcggtattgaaagacttgtttcccggtggtatcaatgtcttatcactcttctctggaattggcggtggtgaagttgctctttatcgtcttggtattccactaaacacagtggtttctgtggaaaaatctgaagtcaacagggatattgtgagaagctggtgggagcaaactaatcagagagggaaccttatacattttaacgatgtgcagcagctgaatggagaccgcttggagcaactgatagagtcatttggaggatttgatttggtaattggtggaagcccgtgcaataaccttgcaggcagtaacagagtgagcagggatgggcttgaaggcaaagagtcttccctattttatgactatgttcggatattggacttggtcaagtccataatgtccagacataaacattag

SEQ ID NO: 668 - DNA, 739 bp, Artificial Sequence; identical to SEQ ID NO: 662
  Synthetic Construct

SEQ ID NO: 669 - DNA, 4686 bp, Artificial Sequence
  Synthetic Construct
agtctagctcaacagagcttttaacccaaattggtacaatagaatacaactttagatcataattctcaaaagaaagagattccttagctattctatctgccactccatttccttctcggcttgtatgcacaagcataaaatcctcaaacttgctaagtagatactttatgtcttggataattggattgagacttgacaagcataactttcatgtaaccaaagacacaagttgctgagaatccacctcaaaaatgatcttcctataattgaatcgggataatgacagcacagcccatctaagagcctccacttctacttccagcacgcttcttacttttaccacagctcttgcacctaaccataacaccttccctgtatgatcgcgaagcacccaccctaagccacattttaatccttctgttggccatgccccatcaaagttgcacttaacccaagattgtggtggagcttcccatgtttctcgtctgtcccgacggtgttgtggttggtgctttccttacattctgagcctctttccttctaatccactcatctgcatcttcttgtgtccttactaatacctcattggttccaaattccctccctttaagcaccagctcgtttctgttcttccacagcctcccaagtatccaagggactaaagcctccacattcttcagatcaggatattcttgtttaagatgttgaactctatggaggtttgtatgaactgatgatctaggaccggataagttcccttcttcatagcgaacttattcaaagaatgttttgtgtatcattcttgttacattgttattaatgaaaaaatattattggtcattggactgaacacgagtgttaaatatggaccaggccccaaataagatccattgatatatgaattaaataacaagaataaatcgagtcaccaaaccacttgccttttttaacgagacttgttcaccaacttgatacaaaagtcattatcctatgcaaatcaataatcatacaaaaatatccaataacactaaaaaattaaaagaaatggataatttcacaatatgttatacgataaagaagttacttttccaagaaattcactgattttataagcccacttgcattagataaatggcaaaaaaaaacaaaaaggaaaagaaataaagcacgaagaattctagaaaatacgaaatacgcttcaatgcagtgggacccacggttcaattattgccaattttcagctccaccgtatatttaaaaaataaaacgataatgctaaaaaaatataaatcgtaacgatcgttaaatctcaacggctggatcttatgacgaccgttagaaattgtggttgtcgacgagtcagtaataaacggcgtcaaagtggttgcagccggcacacacgagtcgtgtttatcaactcaaagcacaaatacttttcctcaacctaaaaataaggcaattagccaaaaacaactttgcgtgtaaacaacgctcaatacacgtgtcattttattattagctattgcttcaccgccttagctttctcgtgacctagtcgtcctcgtcttttcttcttcttcttctataaaacaatacccaaagagctcttcttcttcacaattcagatttcaatttctcaaaatcttaaaaactttctctcaattctctctaccgtgatcaaggtaaatttctgtgttccttattctctcaaaatcttcgattttgttttcgttcgatcccaatttcgtatatgttctttggtttagattctgttaatcttagatcgaagacgattttctgggtttgatcgttagatatcatcttaattctcgattagggtttcatagatatcatccgatttgttcaaataatttgagttttgtcgaataattactcttcgatttgtgatttctatctagatctggtgttagtttctagtttgtgcgatcgaatttgtcgattaatctgagtttttctgattaacagacgcgtccatggttgggtaccaacaaatggctggtggacttaacgatatcttcgaagctcagaagattgaatggcatgaggatactggtggatctagcatccccggacttgaggttcttttccaaggacctctcgagccttataaatgccctgagtgtggaaaatctttctctcaatctggagatcttaggaggcaccaaaggacccataccggtgaaaaaccttataaatgccctgagtgtggaaaatcattcagtaggagtgatcatcttaccacccatcagaggacccatactggtgaaaaaccttataaatgccctgagtgtggaaaatcattctcacaatcttcatctcttgttaggcatcagaggactcataccggagaaaaaccttataaatgccctgagtgtggaaaatcattctcaacatctggaaaccttgttaggcaccaaaggacccatactggtgaaaaaccttataaatgccctgagtgtggaaaatcattctctcagagagcaaaccttagggctcatcaaaggacacacactggagaaaaaccttataaatgccctgagtgtggaaaatctttctctaggagtgataagctcaccgagcatcaaaggactcacaccggactcgaggactacaaagacgatgacgacaaagactacaaagacgatgacgacaaagactacaaagacgatgacgacaaaaagcttgatatcgccatggggggcgcgccaagctatcaaacaagtttgtacaaaaaagcaggctccgcggccgcccccttcaccgagacaattcgtttgcccaaacctatgattgggtttggggttcctaccgaaccacttccagcaatggttcgaagaactcttcccgagcaagctgttggacccccgtttttctactatgaaaatgtggctctagctccaaagggtgtgtgggacacaatttctagatttttgtacgatattgagccagagtttgtcgactccaaatatttttgtgctgctgcaagaaaaaggggttatattcataatctgccggttgaaaatagatttcctttgtttccacttgccccacgtaccattcatgaggcacttcccctatcgaagaaatggtggccatcttgggatccacggacaaagttaaattgtttgcaaacagccattggaagtgcacaattgacgaataggattaggaaagctgtggaggactttgatggtgagccaccaatgagagttcagaagtttgttcttgatcaatgtcggaagtggaatttggtgtgggttgggagaaacaaagttgctcctttggagcctgatgaagttgaaatgctactgggatttccaaagaaccatactaggggaggtggtataagtaggaccgatagatacaagtcgcttggtaattcattccaggttgacactgtggcataccatttgtcggtattgaaagacttgtttcccggtggtatcaatgtcttatcactcttctctggaattggcggtggtgaagttgctctttatcgtcttggtattccactaaacacagtggtttctgtggaaaaatctgaagtcaacagggatattgtgagaagctggtgggagcaaactaatcagagagggaaccttatacattttaacgatgtgcagcagctgaatggagaccgcttggagcaactgatagagtcatttggaggatttgatttggtaattggtggaagcccgtgcaataaccttgcaggcagtaacagagtgagcagggatgggcttgaaggcaaagagtcttccctattttatgactatgttcggatattggacttggtcaagtccataatgtccagacataaacattagaagggtgggcgcgccgacccagctttcttgtacaaagtggttcgataattccttaattaactagttctagagcggccgccaccgcggtggagctcctaggtgagtctagagagttaattaagacccgggactagtccctagagtcctgctttaatgagatatgcgagacgcctatgatcgcatgatatttgctttcaattctgttgtgcacgttgtaaaaaacctgagcatgtgtagctcagatccttaccgccggtttcggttcattctaatgaatatatcacccgttactatcgtatttttatgaataatattctccgttcaatttactgattgtaccctactacttatatgtacaatattaaaatgaaaacaatatattgtgctgaataggtttatagcgacatctatgatagagcgccacaataacaaacaattgcgttttattattacaaatccaattttaaaaaaagcggcagaaccggtcaaacctaaaagactgattacataaatcttattcaaatttcaaaagtgccccaggggctagtatctacgacacaccgagcggcgaactaataacgctcactgaagggaactccggttccccgccggcgcgcatgggtgagattccttgaagttgagtattggccgtccgctctaccgaaagttacgggcaccattcaacccggtccagcacggcggccgggtaaccgacttgctgccccgagaattatgcagcatttttttggtgtatgtgggccccaaatgaagtgcaggtcaaaccttgacagtgacgacaaatcgttgggcgggtccagggcgaattttgcgacgagct

SEQ ID NO: 670 - DNA, 1065 bp, Artificial Sequence; identical to SEQ ID NO: 667
  Synthetic Construct

SEQ ID NO: 671 - DNA, 14414 bp, Artificial Sequence
  Synthetic Construct
  misc_feature 157, 158, 159, 160, 161, 162, 163, 164, 165, 166, 167, 168,169, 170, 171, 172, 173, 174, 175, 176: n = A,T,C or G
ggtttcagaattcaaaaaaagcaccgactcggtgccacttggccctgcagacatgggtgatcctcatgttggccaagttgataacggactagccttattttaacttgctaggccctgcagacatgggtgatcctcatgttggcctagctctaaaacnnnnnnnnnnnnnnnnnnnncaatcactacttcgactctagctgtatataaactcagcttcgttttcttatctaagcgatgtgggacttttgaagattgttttcaacttaaatgggcctatataagaaatactattgttctttcccatataaatgggcctgcttctcttctttcagattcccaggggccttttgaagattatcttcatatcttaagaatgaagatgttttattcaatcaaattcttgaaggttcgatgcctaatcattctaatcctgggacaaactatgaaacaagatacaaaaactccgaatggaaagttaaaaagaagaaaacgaaagctacggttcaagaaaatgtaagctgataaacaaaaaaaaactgtatgaacgaagaagaagaaaaaaagctaagaagaaatgatgtattgtgcggaaggcaagtcgagtttccgttgttcaacgaaagcttaaacctcgtcgcaaaattcgccctggacccgcccaacgatttgtcgtcactgtcaaggtttgacctgcacttcatttggggcccacatacaccaaaaaaatgctgcataattctcggggcagcaagtcggttacccggccgccgtgctggaccgggttgaatggtgcccgtaactttcggtagagcggacggccaatactcaacttcaaggaatctcacccatgcgcgccggcggggaaccggagttcccttcagtgagcgttattagttcgccgctcggtgtgtcgtagatactagcccctggggcacttttgaaatttgaataagatttatgtaatcagtcttttaggtttgaccggttctgccgctttttttaaaattggatttgtaataataaaacgcaattgtttgttattgtggcgctctatcatagatgtcgctataaacctattcagcacaatatattgttttcattttaatattgtacatataagtagtagggtacaatcagtaaattgaacggagaatattattcataaaaatacgatagtaacgggtgatatattcattagaatgaaccgaaaccggcggtaaggatctgagctacacatgctcaggttttttacaacgtgcacaacagaattgaaagcaaatatcatgcgatcataggcgtctcgcatatctcattaaagcaggactctagggactagtcccgggtcttaattaactctctagactcacctaggagctccaccgcggtggcggccgctctagaactagttaattaagaattatcgaaccactttgtacaagaaagctgggcccatgaggccctaatgtttatgtctggacattatggacttgaccaagtccaatatccgaacatagtcataaaatagggaagactctttgccttcaagcccatccctgctcactctgttactgcctgcaaggttattgcacgggcttccaccaattaccaaatcaaatcctccaaatgactctatcagttgctccaagcggtctccattcagctgctgcacatcgttaaaatgtataaggttccctctctgattagtttgctcccaccagcttctcacaatatccctgttgacttcagatttttccacagaaaccactgtgtttagtggaataccaagacgataaagagcaacttcaccaccgccaattccagagaagagtgataagacattgataccaccgggaaacaagtctttcaataccgacaaatggtatgccacagtgtcaacctggaatgaattaccaagcgacttgtatctatcggtcctacttataccacctcccctagtatggttctttggaaatcccagtagcatttcaacttcatcaggctccaaaggagcaactttgtttctcccaacccacaccaaattccacttccgacattgatcaagaacaaacttctgaactctcattggtggctcaccatcaaagtcctccacagctttcctaatcctattcgtcaattgtgcacttccaatggctgtttgcaaacaatttaactttgtccgtggatcccaagatggccaccatttcttcgataggggaagtgcctcatgaatggtacgtggggcaagtggaaacaaaggaaatctattttcaaccggcagattatgaatataacccctttttcttgcagcagcacaaaaatatttggagtcgacaaactctggctcaatatcgtacaaaaatctagaaattgtgtcccacacaccctttggagctagagccacattttcatagtagaaaaacgggggtccaacagcttgctcgggaagagttcttcgaaccattgctggaagtggttcggtaggaaccccaaacccaatcataggtttgggcaaacgaattgtctcggtgaagggggcggccgcggagcctgcttttttgtacaaacttgtttgatagcttggcgcgcccttgtcatcgtcatccttgtagtctttatcgtcatcgtctttataatccgccaccttcctctttttcttaggtccgctacctcctcctccgcttcctcctcctccgcttccacctcctccagcgctgtagatacctgagttagcggcgatggcggaagggataggattaccgtctttgaggagcccctgcattgccttcacgatgagttcacagtcagaattggtagcgaaaattgggatagtgagctccatgttcaggtaggacctccaagcggcgacaggcagttcgactccgcccactgtctgggtagccactttggggacctccaccttgatggtatactttctcttctgggcactagactgcctgacgctgcatgtcaccttgtaggcctggctccgtgagttggagctgatccactctgccaccccattagcgaaattagaaggagccactgtcacatcccctgtcccaccattgtccacgagcacgaactgagtaaagtttgaagccatctgttaatcagaaaaactcagattaatcgacaaattcgatcgcacaaactagaaactaacaccagatctagatagaaatcacaaatcgaagagtaattattcgacaaaactcaaattatttgaacaaatcggatgatatctatgaaaccctaatcgagaattaagatgatatctaacgatcaaacccagaaaatcgtcttcgatctaagattaacagaatctaaaccaaagaacatatacgaaattgggatcgaacgaaaacaaaatcgaagattttgagagaataaggaacacagaaatttaccttgatcacggtagagagaattgagagaaagtttttaagattttgagaaattgaaatctgaattgtgaagaagaagagctctttgggtattgttttatagaagaagaagaagaaaagacgaggacgactaggtcacgagaaagctaaggcggtgaagcaatagctaataataaaatgacacgtgtattgagcgttgtttacacgcaaagttgtttttggctaattgccttatttttaggttgaggaaaagtatttgtgctttgagttgataaacacgactcgtgtgtgccggctgcaaccactttgacgccgtttattactgactcgtcgacaaccacaatttctaacggtcgtcataagatccagccgttgagatttaacgatcgttacgatttatatttttttagcattatcgttttattttttaaatatacggtggagctgaaaattggcaataattgaaccgtgggtcccactgcattgaagcgtatttcgtattttctagaattcttcgtgctttatttcttttcctttttgtttttttttgccatttatctaatgcaagtgggcttataaaatcagtgaatttcttggaaaagtaacttctttatcgtataacatattgtgaaattatccatttcttttaattttttagtgttattggatatttttgtatgattattgatttgcataggataatgacttttgtatcaagttggtgaacaagtctcgttaaaaaaggcaagtggtttggtgactcgatttattcttgttatttaattcatatatcaatggatcttatttggggcctggtccatatttaacactcgtgttcagtccaatgaccaataatattttttcattaataacaatgtaacaagaatgatacacaaaacattctttgaataagttcgctatgaagaagggaacttatccggtcctagatcatcagttcatacaaacctccatagagttcaacatcttaaacaagaatatcctgatctgaagaatgtggaggctttagtcccttggatacttgggaggctgtggaagaacagaaacgagctggtgcttaaagggagggaatttggaaccaatgaggtattagtaaggacacaagaagatgcagatgagtggattagaaggaaagaggctcagaatgtaaggaaagcaccaaccacaacaccgtcgggacagacgagaaacatgggaagctccaccacaatcttgggttaagtgcaactttgatggggcatggccaacagaaggattaaaatgtggcttagggtgggtgcttcgcgatcatacagggaaggtgttatggttaggtgcaagagctgtggtaaaagtaagaagcgtgctggaagtagaagtggaggctcttagatgggctgtgctgtcattatcccgattcaattataggaagatcatttttgaggtggattctcagcaacttgtgtctttggttacatgaaagttatgcttgtcaagtctcaatccaattatccaagacataaagtatctacttagcaagtttgaggattttatgcttgtgcatacaagccgagaaggaaatggagtggcagatagaatagctaaggaatctctttcttttgagaattatgatctaaagttgtattctattgtaccaatttgggttaaaagctctgttgagctagactacgcaaacaagttgtaatgagttgctggcctctcttgggattgttcatcaaagtagctgtccctacacaccacaacagaatggtgttgtggagagaaagcacagacacatccttgagatggcaagggcacttaagtttcagagtggtgtacctaccaggttttggggagactgtgtcaagactgttgtatacctgatcaatagactccctactccaatcttacaaggcaaatgtccatatgaactactctatcagaaacatgccaagcttgatcacttgagagtgtttgggtgtcttgcttttgcagcaacactgcccaaaggtgacaaacttgcacctagagccaagcgaaccatcttcattggttattctgagactcaaaagggttacaggttgtatgacttggataataaggtgatcatagtgagcagggatgtagttttcagagagtttcagttccctttcaaagagtccatctcccatgaacctgatatgttcactcgagcaggttcacttagctctgaagatacagctttgcagctagtgtataatgatatttttccttccagctttcatactgatgatgatgatactccagttcttattcctgacattgtagaggccaatgaggatatcactttggggactcattctacccaaaatcatatcacttcagctgatgctgcaccttcaggccacctgcatgctcctgcagagtcagttgagtcagctgagcctgacctagcaaatgctgaatttgagcaccatactgctgtagctgatccctctctagttccagcaaacctgcacactagacctaaacgcaatgcaggtcctcccatctggctcaaggactttgtgacactgaacaaaggctctagggatgttccataccctatagccaactatgtttcctatgatcacttgcctgttcactatcaagcttatttgagtgctttctccacttatactgaacctaaatccttcaaagaagcagctcaagatgagaaatggatggaggccatgtcccttgagatacaggctcttgaggataataacacctgggagattgtccctttaccccctggtaaacagcctatagggtccaaatgggtgtacaaaattaaatacaaagctaatggtgaagttgacaggtttaaggcaaggctagtggccaagggatacactcagcaagaaggccttgactaccatgaaactttttctccagtggccaaaatggtcactgtaaaagctgtcatatctgttgctgcttccaagggctggttccttttccagatggatgtcaacaatgcttttctacaaggtgacctcatggaagaagtttatatgtctctgcctcagggttttcacagccaaggggagaccaaagtgtgcaggctgttgaatccctctatggtttaaagcaagcatcaaggcagtggaacatcaagcttaccactgtccttatgcaggctggttttatgcaaagtgcttatgatcactccttgtttaccaaaagagaggggactgaccttgtcataatcctgatttatgtggatgatctgttaataacaggcagcagcaatgttttgatttcagaagcaaaggcaaccctgcatcagcatttcaagatgaaagatttgggagaactaaaatacttcttaggcattgaggtgctgagatcagaaaagggaatcctactgaaccagaggaagtatgcactggaactgatatcaggtgttggtctgggaggctgcagaccagtgtcaaccccaatggaacagaaccaaaggctgactactgtagaatatgacaagcacttaggaaagactgatgatgcagagttagaggatgtgggttcctatcagagactggtgggaaagcttctctacttgacaatcacaaggccagatatcagctttgcagtgcaggtgctgagtcaattcatgcagcaacccaaacagtcacacctggaagcagcattgagggttgtgaagtacataaaaggttctccaggtgttaggaagcggccgcatgcatatgagtctagctcaacagagcttttaacccaaattggtacaatagaatacaactttagatcataattctcaaaagaaagagattccttagctattctatctgccactccatttccttctcggcttgtatgcacaagcataaaatcctcaaacttgctaagtagatactttatgtcttggataattggattgagacttgacaagcataactttcatgtaaccaaagacacaagttgctgagaatccacctcaaaaatgatcttcctataattgaatcgggataatgacagcacagcccatctaagagcctccacttctacttccagcacgcttcttacttttaccacagctcttgcacctaaccataacaccttccctgtatgatcgcgaagcacccaccctaagccacattttaatccttctgttggccatgccccatcaaagttgcacttaacccaagattgtggtggagcttcccatgtttctcgtctgtcccgacggtgttgtggttggtgctttccttacattctgagcctctttccttctaatccactcatctgcatcttcttgtgtccttactaatacctcattggttccaaattccctccctttaagcaccagctcgtttctgttcttccacagcctcccaagtatccaagggactaaagcctccacattcttcagatcaggatattcttgtttaagatgttgaactctatggaggtttgtatgaactgatgatctaggaccggataagttcccttcttcatagcgaacttattcaaagaatgttttgtgtatcattcttgttacattgttattaatgaaaaaatattattggtcattggactgaacacgagtgttaaatatggaccaggccccaaataagatccattgatatatgaattaaataacaagaataaatcgagtcaccaaaccacttgccttttttaacgagacttgttcaccaacttgatacaaaagtcattatcctatgcaaatcaataatcatacaaaaatatccaataacactaaaaaattaaaagaaatggataatttcacaatatgttatacgataaagaagttacttttccaagaaattcactgattttataagcccacttgcattagataaatggcaaaaaaaaacaaaaaggaaaagaaataaagcacgaagaattctagaaaatacgaaatacgcttcaatgcagtgggacccacggttcaattattgccaattttcagctccaccgtatatttaaaaaataaaacgataatgctaaaaaaatataaatcgtaacgatcgttaaatctcaacggctggatcttatgacgaccgttagaaattgtggttgtcgacgagtcagtaataaacggcgtcaaagtggttgcagccggcacacacgagtcgtgtttatcaactcaaagcacaaatacttttcctcaacctaaaaataaggcaattagccaaaaacaactttgcgtgtaaacaacgctcaatacacgtgtcattttattattagctattgcttcaccgccttagctttctcgtgacctagtcgtcctcgtcttttcttcttcttcttctataaaacaatacccaaagagctcttcttcttcacaattcagatttcaatttctcaaaatcttaaaaactttctctcaattctctctaccgtgatcaaggtaaatttctgtgttccttattctctcaaaatcttcgattttgttttcgttcgatcccaatttcgtatatgttctttggtttagattctgttaatcttagatcgaagacgattttctgggtttgatcgttagatatcatcttaattctcgattagggtttcatagatatcatccgatttgttcaaataatttgagttttgtcgaataattactcttcgatttgtgatttctatctagatctggtgttagtttctagtttgtgcgatcgaatttgtcgattaatctgagtttttctgattaacagggatcatcaacaagtttgtacaaaaaagcaggctctttaaagtatttttacaacaattaccaacaacaacaaacaacaaacaacattacaattactatttacaattacaaaaaaagttaacatggacaaaaaatacagcattgggttggacattgggacaaatagcgtgggttgggcagtcattacagacgaatacaaggttcctagcaagaagttcaaggtgttgggcaacactgacaggcactcgatcaagaaaaatctcattggtgcactccttttcgatagtggggagactgccgaagcgaccagactgaaaaggactgctagaaggcgctatacccggcgtaagaatcgcatttgctacctccaggagatattctctaacgaaatggccaaggttgatgacagcttctttcatcgcttggaggaatcattcctcgtcgaggaagacaagaaacacgagcggcatccgatctttggaaacattgttgatgaggtcgcatatcacgaaaagtaccccacgatctaccatcttcgcaagaaactggtggattcaactgacaaggctgatctgcggttgatatacctcgcacttgctcacatgatcaagttccgtggccattttcttattgagggagacctgaaccctgataattctgacgtcgataagttgttcatccagctcgtgcaaacatacaatcagctctttgaggaaaaccctatcaacgcctctggagttgatgccaaagcgatcctttccgcgaggctgtcgaagagtagaaggctggagaacttgatcgcccaacttcctggcgaaaagaaaaacggtttgttcgggaatctcattgcgctgagcttgggactcacgccaaacttcaagtctaacttcgacctcgcagaggatgctaaacttcagctgtccaaggatacttatgatgacgatcttgacaacctgttggcacaaatcggtgaccagtacgctgatttgttcctcgctgccaagaacctcagcgatgccatactcctttcagacatcctccgcgtgaacactgagattaccaaagcacctctgtctgcttccatgataaagcgttatgatgagcaccatcaagacctcactctgttgaaggcgttggttagacagcaactcccagagaagtacaaagaaatcttctttgaccaatctaagaatggctacgccggatatattgatggcggagcgtcccaggaggagttctacaagtttatcaaacctattcttgagaagatggatggtacggaggaactccttgttaaactgaatagagaggatctcttgcgcaagcaacggactttcgacaacggcagcataccgcaccagatccatctcggagagcttcacgccatccttcgccggcaggaagatttctacccctttctgaaggacaaccgtgagaagatcgaaaaaatccttactttcagaatcccttactatgtcggtccactggctagaggcaactctagatttgcttggatgacacgcaagagtgaggaaactatcaccccttggaacttcgaggaagtggttgacaagggcgcatcggctcaaagtttcattgagagaatgactaattttgataagaaccttccgaacgagaaagtcctgcccaagcattcactcctttacgagtatttcacagtgtataacgaacttacgaaggtgaaatacgttactgagggtatgcggaagccggcattcctgtcgggggaacaaaagaaagctatagtggatctgttgttcaaaactaacaggaaggttaccgtcaagcagcttaaggaggattacttcaagaaaatagaatgttttgactcggtggagatcagtggcgttgaagatagattcaacgcttcactgggaacctaccacgacctccttaagatcattaaggacaaagatttcttggataacgaggaaaatgaggacattctcgaagatatagtccttacactgacgttgtttgaggaccgtgaaatgatcgaggaaagattgaagacctatgctcatctcttcgacgataaggttatgaagcagctcaagcgtagaaggtacacaggttgggggcgtctttctagaaagctgattaatggcataagggataaacaatctggaaagacgattctggatttcctcaagtccgacggcttcgccaaccgcaattttatgcagcttatacacgacgattccctgactttcaaagaggacatccagaaggcccaagttagcggccaaggagattcacttcacgagcatatcgccaacctggcgggtagcccggcgatcaagaaagggattcttcagaccgtcaaggtcgtggatgagctggtgaaagttatgggccggcataagcccgaaaacatagtgatcgagatggcccgtgaaaatcagactacccaaaaaggacagaagaactcccgcgagcggatgaaaaggatagaggaaggcatcaaggaacttggaagccagatcctgaaggagcacccagttgaaaacacacagttgcaaaatgagaagctctatctttactatctccaaaatggtagagacatgtatgtggatcaggagttggacattaacaggctctcagactacgatgtcgaccatatcgtgccgcaatcgttccttaaggacgatagtatagataataaggtgctgactcggtcggataaaaaccgtggcaagtcggacaatgttcccagtgaggaagttgtgaagaagatgaagaactactggcgccaactgttgaatgcaaaattgatcacccagaggaagtttgacaacctcacaaaagcagagcgcggtgggctcagtgaacttgataaagctggattcattaagaggcaacttgttgagacacgccagattacgaagcacgtcgcgcagatactggattctaggatgaacaccaagtacgacgagaatgataaattgatcagagaagtgaaggttatcacattgaagtctaaactcgtgtccgattttcgcaaagacttccaattttataaggttcgggagatcaacaattatcaccatgcacatgatgcttacctcaacgccgtggttggtacggcgttgattaagaaatacccgaagctggagtctgagttcgtgtacggggattataaggtctacgacgtgaggaaaatgatcgctaagagtgagcaggaaattggtaaagccaccgcgaagtatttcttttactctaacatcatgaacttcttcaagacagagataacgttggcaaatggtgaaatacgtaagagacctctcatcgagactaacggtgaaaccggggaaatcgtttgggataaagggcgggactttgctactgttcgtaaggtcctctccatgccgcaagtgaatattgttaagaaaacagaggtccagacgggcggattctctaaggaatccatccttcccaaaagaaacagcgacaagctgattgcgaggaagaaagattgggaccctaagaaatatggtgggttcgattctccaaccgttgcctactccgtcttggtcgtggcgaaggttgagaagggtaaatctaagaaactcaaatccgtcaaggaactccttgggattactatcatggagaggtcttccttcgaaaagaatcctatcgatttccttgaggctaaaggctataaggaagtgaagaaggatctcatcatcaagctcccaaagtacagcctgtttgagttggaaaacggaaggaagcgcatgttggcatcagctggagagctccagaaagggaacgagctggccttgccttctaagtatgtgaacttcctctatcttgcgtcgcactacgagaagctgaaaggcagtccagaggacaacgaacagaaacaactttttgttgagcaacacaagcattatctggatgagattatagaacagatcagcgagttctcaaaaagagtcattcttgccgatgctaacctcgacaaggtgctctccgcatacaacaaacacagagacaagccgatcagggagcaggctgaaaatatcattcatctcttcactcttaccaacctgggtgcccccgcggcattcaagtattttgatacaacgattgaccggaaacgttacacaagcacgaaggaggtccttgatgcgaccctgattcatcaaagcataacagggctctatgagacgagaatcgatttgtcacagctcggcggagactacccgtatgacgtgcccgattacgctgccgcggcagctgagttcaagcgcgaggaacaggcccggaaggcgaaagtgaacaatgagaagaaaacagaaatcgttaaacctgagagctgctcaaacgagggagacgttaaggatcttaagaggaaagactctgaggatggcaacgaaggagaggaagaggaagctagctcaaaacctaagaaaccaaaggtggcactctcacatctccaagacattgacgacaccgaagcagaccaagaagaagaacccgggggcgcgccatgataactagagtcctgctttaatgagatatgcgagacgcctatgatcgcatgatatttgctttcaattctgttgtgcacgttgtaaaaaacctgagcatgtgtagctcagatccttaccgccggtttcggttcattctaatgaatatatcacccgttactatcgtatttttatgaataatattctccgttcaatttactgattgtaccctactacttatatgtacaatattaaaatgaaaacaatatattgtgctgaataggtttatagcgacatctatgatagagcgccacaataacaaacaattgcgttttattattacaaatccaattttaaaaaaagcggcagaaccggtcaaacctaaaagactgattacataaatcttattcaaatttcaaaagtgccccaggggctagtatctacgacacaccgagcggcgaactaataacgctcactgaagggaactccggttccccgccggcgcgcatgggtgagattccttgaagttgagtattggccgtccgctctaccgaaagttacgggcaccattcaacccggtccagcacggcggccgggtaaccgacttgctgccccgagaattatgcagcatttttttggtgtatgtgggccccaaatgaagtgcaggtcaaaccttgacagtgacgacaaatcgttgggcgggtccagggcgaattttgcgacaacatgtcgaggctcagcaggaccggcatgcaagctagcttactagtgatattctatagtgtcacctaaatctgcggc

SEQ ID NO: 672 - DNA, 1457 bp, Artificial Sequence
  Synthetic Construct
gaaggttctcatcatataccgaaagaatgggaaatttgaaaattccatacttttttaaaaagacaatttgttttatcactttagtttttttatatattcagcgtctaccaaatctacacttttttttctttctcgatttagttaatcttcgttcttgtgtcatgtaatagattactatttcaaaacatagatatttagttatctaaataaaactaggccatccatggatggtttcaattttttttttcatatgaaagaaaagttaaatttcatttcacaataaccattgattactaaatttagtaaagaatcaattgggtttagtgtttacttgtttaaggttttttttttttcttttgttatggttctatactaatatcaaagagttatgggccgaagcccatacatctttccgtcgagaatctcatatattctttatcgaagcccatacatctttccgtcgagaatctcatatataccttatcccattcaacattcatacgagcgccgctctagggtttttgcttttcgccattggtccaagtgctatttggttgtttaaggttgcttttagcacacaactttaatattatttttatgtttttcttcttacgatttatcgatttgtgggatactgacaatcagattattgttgttttttccagccaaatatcagatcttgcgccgctctttatcccattcaacattcatacgagcaccgctttacggtttttgcttttcgacattggtcgaagtgctatttggttgtttaaggttgcttttagcacacaactttaatattatttttatgttttcttcttacgatttatcgatttgtaggatactgacaatcagatttttgttgtttttttcagccaaaaatcagatttttttacattttgtttagagaatgattttggttcccgatttgtctgtttttcgcttatgtgtaaagtactttgaaaaatattgtgttaactctacaatgggtatcccaaatttttgagttcttttgtcttgttcgttgtcgagacactagaaatgttaatttaattctcttcttccaaaaagaaccatttactggttcattctctacttgaattttattctggttgtatttcttttccagtataaagcagattgttttttgttatttttcagtttagattggctttgtctcttttgagttgttgcaattgtcaaactttggaatgaaatagtaaataatcttaggttggtagtaaatcttaacattgtgtttttggggcataatttatcgataaaatcttcagcattaaaaccaaaaagaaaaaactttttaagtcttttttgtttggtggttaatataaagtttatacgtgtattaatttgatcacactcactatatgtccagggagctaaacctctatatcgagtactaatagtatgcaatgtccaggttattgcattgagggaaa

SEQ ID NO: 673 - DNA, 1653 bp, Artificial Sequence
  Synthetic Construct
atggaagacgccaaaaacataaagaaaggcccggcgccattctatccgctggaagatggaaccgctggagagcaactgcataaggctatgaagagatacgccctggttcctggaacaattgcttttacagatgcacatatcgaggtggacatcacttacgctgagtacttcgaaatgtccgttcggttggcagaagctatgaaacgatatgggctgaatacaaatcacagaatcgtcgtatgcagtgaaaactctcttcaattctttatgccggtgttgggcgcgttatttatcggagttgcagttgcgcccgcgaacgacatttataatgaacgtgaattgctcaacagtatgggcatttcgcagcctaccgtggtgttcgtttccaaaaaggggttgcaaaaaattttgaacgtgcaaaaaaagctcccaatcatccaaaaaattattatcatggattctaaaacggattaccagggatttcagtcgatgtacacgttcgtcacatctcatctacctcccggttttaatgaatacgattttgtgccagagtccttcgatagggacaagacaattgcactgatcatgaactcctctggatctactggtctgcctaaaggtgtcgctctgcctcatagaactgcctgcgtgagattctcgcatgccagagatcctatttttggcaatcaaatcattccggatactgcgattttaagtgttgttccattccatcacggttttggaatgtttactacactcggatatttgatatgtggatttcgagtcgtcttaatgtatagatttgaagaagagctgtttctgaggagccttcaggattacaagattcaaagtgcgctgctggtgccaaccctattctccttcttcgccaaaagcactctgattgacaaatacgatttatctaatttacacgaaattgcttctggtggcgctcccctctctaaggaagtcggggaagcggttgccaagaggttccatctgccaggtatcaggcaaggatatgggctcactgagactacatcagctattctgattacacccgagggggatgataaaccgggcgcggtcggtaaagttgttccattttttgaagcgaaggttgtggatctggataccgggaaaacgctgggcgttaatcaaagaggcgaactgtgtgtgagaggtcctatgattatgtccggttatgtaaacaatccggaagcgaccaacgccttgattgacaaggatggatggctacattctggagacatagcttactgggacgaagacgaacacttcttcatcgttgaccgcctgaagtctctgattaagtacaaaggctatcaggtggctcccgctgaattggaatccatcttgctccaacaccccaacatcttcgacgcaggtgtcgcaggtcttcccgacgatgacgccggtgaacttcccgccgccgttgttgttttggagcacggaaagacgatgacggaaaaagagatcgtggattacgtcgccagtcaagtaacaaccgcgaaaaagttgcgcggaggagttgtgtttgtggacgaagtaccgaaaggtcttaccggaaaactcgacgcaagaaaaatcagagagatcctcataaaggccaagaagggcggaaagatcgccgtgtaa

SEQ ID NO: 674 - DNA, 399 bp, Artificial Sequence
  Synthetic Construct
gtacccctactccaaaaatgtcaaagatacagtctcagaagaccaaagggctattgagacttttcaacaaagggtaatttcgggaaacctcctcggattccattgcccagctatctgtcacttcatcgaaaggacagtagaaaaggaaggtggctcctacaaatgccatcattgcgataaaggaaaggctatcattcaagatgcctctgccgacagtggtcccaaagatggacccccacccacgaggagcatcgtggaaaaagaagacgttccaaccacgtcttcaaagcaagtggattgatgtgacatctccactgacgtaagggatgacgcacaatcccactatccttcgcaagacccttcctctatataaggaagttcatttcatttggagaggac

SEQ ID NO: 675 - DNA, 936 bp, Artificial Sequence
  Synthetic Construct
atgacttcgaaagtttatgatccagaacaaaggaaacggatgataactggtccgcagtggtgggccagatgtaaacaaatgaatgttcttgattcatttattaattattatgattcagaaaaacatgcagaaaatgctgttatttttttacatggtaacgcggcctcttcttatttatggcgacatgttgtgccacatattgagccagtagcgcggtgtattataccagaccttattggtatgggcaaatcaggcaaatctggtaatggttcttataggttacttgatcattacaaatatcttactgcatggtttgaacttcttaatttaccaaagaagatcatttttgtcggccatgattggggtgcttgtttggcatttcattatagctatgagcatcaagataagatcaaagcaatagttcacgctgaaagtgtagtagatgtgattgaatcatgggatgaatggcctgatattgaagaagatattgcgttgatcaaatctgaagaaggagaaaaaatggttttggagaataacttcttcgtggaaaccatgttgccatcaaaaatcatgagaaagttagaaccagaagaatttgcagcatatcttgaaccattcaaagagaaaggtgaagttcgtcgtccaacattatcatggcctcgtgaaatcccgttagtaaaaggtggtaaacctgacgttgtacaaattgttaggaattataatgcttatctacgtgcaagtgatgatttaccaaaaatgtttattgaatcggacccaggattcttttccaatgctattgttgaaggtgccaagaagtttcctaatactgaatttgtcaaagtaaaaggtcttcatttttcgcaagaagatgcacctgatgaaatgggaaaatatatcaaatcgttcgttgagcgagttctcaaaaatgaacaataa

SEQ ID NO: 676 - DNA, 222 bp, Artificial Sequence
  Synthetic Construct
acgctgaaatcaccagtctctctctacaaatctatctctctctattttctccataaataatgtgtgagtagtttcccgataagggaaattagggttcttatagggtttcgctcatgtgttgagcatataagaaacccttagtatgtatttgtatttgtaaaatacttctatcaataaaatttctaattcctaaaaccaaaatccagtactaaaatccagatc

SEQ ID NO: 677 - DNA, 5258 bp, Artificial Sequence
  Synthetic Construct
gaaggttctcatcatataccgaaagaatgggaaatttgaaaattccatacttttttaaaaagacaatttgttttatcactttagtttttttatatattcagcgtctaccaaatctacacttttttttctttctcgatttagttaatcttcgttcttgtgtcatgtaatagattactatttcaaaacatagatatttagttatctaaataaaactaggccatccatggatggtttcaattttttttttcatatgaaagaaaagttaaatttcatttcacaataaccattgattactaaatttagtaaagaatcaattgggtttagtgtttacttgtttaaggttttttttttttcttttgttatggttctatactaatatcaaagagttatgggccgaagcccatacatctttccgtcgagaatctcatatattctttatcgaagcccatacatctttccgtcgagaatctcatatataccttatcccattcaacattcatacgagcgccgctctagggtttttgcttttcgccattggtccaagtgctatttggttgtttaaggttgcttttagcacacaactttaatattatttttatgtttttcttcttacgatttatcgatttgtgggatactgacaatcagattattgttgttttttccagccaaatatcagatcttgcgccgctctttatcccattcaacattcatacgagcaccgctttacggtttttgcttttcgacattggtcgaagtgctatttggttgtttaaggttgcttttagcacacaactttaatattatttttatgttttcttcttacgatttatcgatttgtaggatactgacaatcagatttttgttgtttttttcagccaaaaatcagatttttttacattttgtttagagaatgattttggttcccgatttgtctgtttttcgcttatgtgtaaagtactttgaaaaatattgtgttaactctacaatgggtatcccaaatttttgagttcttttgtcttgttcgttgtcgagacactagaaatgttaatttaattctcttcttccaaaaagaaccatttactggttcattctctacttgaattttattctggttgtatttcttttccagtataaagcagattgttttttgttatttttcagtttagattggctttgtctcttttgagttgttgcaattgtcaaactttggaatgaaatagtaaataatcttaggttggtagtaaatcttaacattgtgtttttggggcataatttatcgataaaatcttcagcattaaaaccaaaaagaaaaaactttttaagtcttttttgtttggtggttaatataaagtttatacgtgtattaatttgatcacactcactatatgtccagggagctaaacctctatatcgagtactaatagtatgcaatgtccaggttattgcattgagggaaaccatggaagacgccaaaaacataaagaaaggcccggcgccattctatccgctggaagatggaaccgctggagagcaactgcataaggctatgaagagatacgccctggttcctggaacaattgcttttacagatgcacatatcgaggtggacatcacttacgctgagtacttcgaaatgtccgttcggttggcagaagctatgaaacgatatgggctgaatacaaatcacagaatcgtcgtatgcagtgaaaactctcttcaattctttatgccggtgttgggcgcgttatttatcggagttgcagttgcgcccgcgaacgacatttataatgaacgtgaattgctcaacagtatgggcatttcgcagcctaccgtggtgttcgtttccaaaaaggggttgcaaaaaattttgaacgtgcaaaaaaagctcccaatcatccaaaaaattattatcatggattctaaaacggattaccagggatttcagtcgatgtacacgttcgtcacatctcatctacctcccggttttaatgaatacgattttgtgccagagtccttcgatagggacaagacaattgcactgatcatgaactcctctggatctactggtctgcctaaaggtgtcgctctgcctcatagaactgcctgcgtgagattctcgcatgccagagatcctatttttggcaatcaaatcattccggatactgcgattttaagtgttgttccattccatcacggttttggaatgtttactacactcggatatttgatatgtggatttcgagtcgtcttaatgtatagatttgaagaagagctgtttctgaggagccttcaggattacaagattcaaagtgcgctgctggtgccaaccctattctccttcttcgccaaaagcactctgattgacaaatacgatttatctaatttacacgaaattgcttctggtggcgctcccctctctaaggaagtcggggaagcggttgccaagaggttccatctgccaggtatcaggcaaggatatgggctcactgagactacatcagctattctgattacacccgagggggatgataaaccgggcgcggtcggtaaagttgttccattttttgaagcgaaggttgtggatctggataccgggaaaacgctgggcgttaatcaaagaggcgaactgtgtgtgagaggtcctatgattatgtccggttatgtaaacaatccggaagcgaccaacgccttgattgacaaggatggatggctacattctggagacatagcttactgggacgaagacgaacacttcttcatcgttgaccgcctgaagtctctgattaagtacaaaggctatcaggtggctcccgctgaattggaatccatcttgctccaacaccccaacatcttcgacgcaggtgtcgcaggtcttcccgacgatgacgccggtgaacttcccgccgccgttgttgttttggagcacggaaagacgatgacggaaaaagagatcgtggattacgtcgccagtcaagtaacaaccgcgaaaaagttgcgcggaggagttgtgtttgtggacgaagtaccgaaaggtcttaccggaaaactcgacgcaagaaaaatcagagagatcctcataaaggccaagaagggcggaaagatcgccgtgtaattctagagaattcgctgaaatcaccagtctctctctacaaatctatctctctctattttctccataaataatgtgtgagtagtttcccgataagggaaattagggttcttatagggtttcgctcatgtgttgagcatataagaaacccttagtatgtatttgtatttgtaaaatacttctatcaataaaatttctaattcctaaaaccaaaatccagtactaaaatccagatccactagccttgacaggatatattggcgggtaaactaagtcgctgtatgtgtttgtttgagatctagatcttggcaggatatattgtggtgtaacgttatcgtacccctactccaaaaatgtcaaagatacagtctcagaagaccaaagggctattgagacttttcaacaaagggtaatttcgggaaacctcctcggattccattgcccagctatctgtcacttcatcgaaaggacagtagaaaaggaaggtggctcctacaaatgccatcattgcgataaaggaaaggctatcattcaagatgcctctgccgacagtggtcccaaagatggacccccacccacgaggagcatcgtggaaaaagaagacgttccaaccacgtcttcaaagcaagtggattgatgtgacatctccactgacgtaagggatgacgcacaatcccactatccttcgcaagacccttcctctatataaggaagttcatttcatttggagaggacagcccaccaccatgacttcgaaagtttatgatccagaacaaaggaaacggatgataactggtccgcagtggtgggccagatgtaaacaaatgaatgttcttgattcatttattaattattatgattcagaaaaacatgcagaaaatgctgttatttttttacatggtaacgcggcctcttcttatttatggcgacatgttgtgccacatattgagccagtagcgcggtgtattataccagaccttattggtatgggcaaatcaggcaaatctggtaatggttcttataggttacttgatcattacaaatatcttactgcatggtttgaacttcttaatttaccaaagaagatcatttttgtcggccatgattggggtgcttgtttggcatttcattatagctatgagcatcaagataagatcaaagcaatagttcacgctgaaagtgtagtagatgtgattgaatcatgggatgaatggcctgatattgaagaagatattgcgttgatcaaatctgaagaaggagaaaaaatggttttggagaataacttcttcgtggaaaccatgttgccatcaaaaatcatgagaaagttagaaccagaagaatttgcagcatatcttgaaccattcaaagagaaaggtgaagttcgtcgtccaacattatcatggcctcgtgaaatcccgttagtaaaaggtggtaaacctgacgttgtacaaattgttaggaattataatgcttatctacgtgcaagtgatgatttaccaaaaatgtttattgaatcggacccaggattcttttccaatgctattgttgaaggtgccaagaagtttcctaatactgaatttgtcaaagtaaaaggtcttcatttttcgcaagaagatgcacctgatgaaatgggaaaatatatcaaatcgttcgttgagcgagttctcaaaaatgaacaataattctagccggtacgctgaaatcaccagtctctctctacaaatctatctctctctattttctccataaataatgtgtgagtagtttcccgataagggaaattagggttcttatagggtttcgctcatgtgttgagcatataagaaacccttagtatgtatttgtatttgtaaaatacttctatcaataaaatttctaattcctaaaaccaaaatccagtactaaaatccagatcgataacattaacgtttacaatttccattcgccattcaggctgcgcaactgttgggaagggcgatcggtgcgggcctcttcgctattacgccagctggcgaaagggggatgtgctgcaaggcgattaagttgggtaacgccagggttttcccagtcacgacgttgtaaaacgacggccagtgaattgtaatacgactcactatagggcgaattgggtaccgggccccccctcgag

SEQ ID NO: 678 - protein, 608 aa, Nicotiana tabacum
MDNNLSGEDNDNIDWDTEDELEIQEIQDTTFSSCMDLRTTGQHTVRCDGEASSSSVPCQSKFIQQFVVMGFPEASIAKAIEQNGEDSDLVLDALLTFKALEDSPEEQPSASPQPCINSDDSSSEYNENLLDDVYEEDSWSSDSDSCRNSAKQCYVKVESSSSSEKEQTLLFLASMGYPAEEASIAMERCGPEASVAELTDFICAAQMARAEDVYLPEDVKPKLNHILNGSGGYKKRKMYNELCKRKKAKAIFEEETIRLPKPMIGFGVPTEPLPAMVRRTLPEQAVGPPFFYYENVALAPKGVWDTISRFLYDIEPEFVDSKYFCAAARKRGYIHNLPVENRFPLFPLAPRTIHEALPLSKKWWPSWDPRTKLNCLQTAIGSAQLTNRIRKAVEDFDGEPPMRVQKFVLDQCRKWNLVWVGRNKVAPLEPDEVEMLLGFPKNHTRGGGISRTDRYKSLGNSFQVDTVAYHLSVLKDLFPGGINVLSLFSGIGGGEVALYRLGIPLNTVVSVEKSEVNRDIVRSWWEQTNQRGNLIHFNDVQQLNGDRLEQLIESFGGFDLVIGGSPCNNLAGSNRVSRDGLEGKESSLFYDYVRILDLVKSIMSRHKH

SEQ ID NO: 679 - protein, 354 aa, Artificial Sequence
  Synthetic Construct
ETIRLPKPMIGFGVPTEPLPAMVRRTLPEQAVGPPFFYYENVALAPKGVWDTISRFLYDIEPEFVDSKYFCAAARKRGYIHNLPVENRFPLFPLAPRTIHEALPLSKKWWPSWDPRTKLNCLQTAIGSAQLTNRIRKAVEDFDGEPPMRVQKFVLDQCRKWNLVWVGRNKVAPLEPDEVEMLLGFPKNHTRGGGISRTDRYKSLGNSFQVDTVAYHLSVLKDLFPGGINVLSLFSGIGGGEVALYRLGIPLNTVVSVEKSEVNRDIVRSWWEQTNQRGNLIHFNDVQQLNGDRLEQLIESFGGFDLVIGGSPCNNLAGSNRVSRDGLEGKESSLFYDYVRILDLVKSIMSRHKH

SEQ ID NO: 680 - protein, 386 aa, Artificial Sequence
  Synthetic Construct
MSKVENKTKKLRVFEAFAGIGAQRKALEKVRKDEYEIVGLAEWYVPAIVMYQAIHNNFHTKLEYKSVSREEMIDYLENKTLSWNSKNPVSNGYWKRKKDDELKIIYNAIKLSEKEGNIFDIRDLYKRTLKNIDLLTYSFPCQDLSQQGIQKGMKRGSGTRSGLLWEIERALDSTEKNDLPKYLLMENVGALLHKKNEEELNQWKQKLESLGYQNSIEVLNAADFGSSQARRRVFMISTLNEFVELPKGDKKPKSIKKVLNKIVSEKDILNNLLKYNLTEFKKTKSNINKASLIGYSKFNSEGYVYDPEFTGPTLTASGANSRIKIKDGSNIRKMNSDETFLYIGFDSQDGKRVNEIEFLTENQKIFVCGNSISVEVLEAIIDKIGG

SEQ ID NO: 681 - protein, 1479 aa, Arabidopsis thaliana
MEANEESLKGKIEKLEGKEVIVESKEDEMDIIIEENREAEQEVMEVKARDGRGEQNDVLMEENNNQGEQKDEEMQDASSRSESSDFNSDEDEQILSRRDDELDLEKPLSEEEIDELISDLLAVESKAAEAQEALEKESLSKVESEVREELAQALRGDELDEAVAAEMMTFKDEWEATLDELETESATLLEQLDGAGIELPKLYEMIESQAPNGCYTEAWKQRAHWVGTQVTKETVESLANAERFLHTHRPVRKRHGKLLEEGASGFLEKKLADGAVKESLAGTSELDWSSLNKVFSEKRDESVSFGSKQWASVYLASTPHQAAAMGLEFPGVNEVEEIEEIDASLADPFLADAIDNERELALTEEQKTNYIRVKEEDDITCDRVLQLRLKRKRRKKRSKQVIRCAAENMDDDSVYLDGNNTTPNFAKDQVKSPETSTQVHNSEVNIEENGNFSNSDVDKMTPSTHINVDAKRDDSQNPANNFRCTACNKVAVEVHSHPLLEVIVCMDCKRSIEDRVSKVDDSLERHCEWCGHIADLIDCRTCEKLFCASCIKRNIGEEYMSEAQSSGWDCCCCSPIPLQRLTLELEKAMRDKKSIELSSDSSSDSSSDNNSVDTDADVNVTISSKKKSKKKIRRIIDDAELGKDTRTKIAIEKARQERLRSLQFSARYKTISSMGDVKSIPEGAEVEVLGDAHSGYIVNVVREIGEEAVRVPRSISAKLKVHQVTGIRFMWENIIQSISRVKSGDKGLGCILAHTMGLGKTFQVIAFLYTAMRCVDLGLKTALIVTPVNVLHNWRSEFEKWMPSEVKPLRIFMLGDVSRERRFDLLTKWRKKGGVFLMGYTNFRNLSLGRGVKDLNAARGICNALRDGPDILVCDEAHIIKNTKADTTQALKQVKCQRRIALTGSPLQNNLMEYYCMVDFVREGFLGSSPEFRNRFQNPIENGQHMNSTAEDVKIMNQRSHILYEQLKGFVQRMDMNVVKKDLPPKTVFVISVKLSPLQRILYQRFLELYGFSDGRTDERMRKNFFAAYQVLAQILNHPGIPQLRSEDSKNGRRGSIVDIPDDCSSDENIDYNMVTGEKQRTMNDLQDKVDGYLQKDWWVDLLQKNNYKVSDFSGKMILLLDILSMSADVGDKALVFSQSIPTLDLIELYLSRVPRHGKQGKFWKKGKDWYRIDGKTESSERQKLVDRFNEPDNKRVKCTLISTRAGSLGINLYAANRVIIVDGSWNPTYDLQAIFRAWRYGQKKPVFAYRLMARGTIEEKIYKRQVTKEGLAARVVDRQQVHRTISKEEMLHLFEFDDDDEKSEAVTEISKQNEAGHSNLVEQAILWTKKATLSRVGGDKLMENLLQRHGPNWISSFHEHETLLQENEEERLTKEEKDMAWEVYRRALEWEEVQRVPFSESPVVPKPSPSTQTEPLPQPKGFNRSRFVNRNCTRIAHQLTLISQGLKVGSSTVCGECGRVIRWEDVIPASKLSAVIVN

SEQ ID NO: 682 - protein, 1483 aa, Arabidopsis lyrata
MEVKEKDEVLEKKEDTVEAKEDEMDIIITEERMEAKLDEVKARDERGEQNDVLMEEINNQAEQKDVLMEEDNNQAELKDEEMQDTSSRSESSDFNSDEDEQFLPGRDDELDFEKPLSEEEIEELISDLLGVESKAAEAQEALEKESLSKVESEVREELAQALRGDELDEAVAAEMMTFKDEWEANLDELETESAHLLEQLDGAGIELPKLYEMIESQAPNGCYTEAWKQRAHWVGTQVTKETGESLANAERFLQTHRPVRKRHGKLLEEGASGFLEKKFADGDIKESLAGTSELEWSSLNKVFSEKRDESISFGSKHWASVYLASTPHQAAAMGLEFPGVNEVEEIEEIDASLADPFLADAIDNERELALTEEQKTNYIRVKEEDDINCDRELQLRLKRKRRKKRSKQVIRCAAENMDDDSVYLDGNYIAPNFAKDQVKSPETSTQVHSNEVNKEGNGNLSNSDVDKMVSSPNINVDTMRDDSQNPANSFMCTACNNVAVEVHSHPLLEVIVCMDCKRSIEDRVSKVDDSLERHCEWCGHIADLIDCRTCEKLFCASCIKRNIGEEYLAEAQSSGWDCCCCSPIPLQRLTLELEKAMRDKKSIESSSDSSSDSSSDNNSVDTDADVNVTISSKKKSKKKIRRIIDDAELGKDTRTKIAIEKARQERLRSLQFSARYKTISSMGDVKSIPEGAEVEVLGDAHSGYIVNVVREIGEEAVRVPRSISAKLKVHQVTGIRFMWENIIQSISRVKSGDKGLGCILAHTMGLGKTFQVIAFLYTAMRCVDLGLKTALIVTPVNVLHNWRSEFVKWGPSEVKPLRIFMLEDVSREKRLDLLKKWRNKGGVFLMGYAKFRNLSLGKGVKDLNAAREICNALRDGPDILVCDEAHIIKNTRADTTQALKQVKCQRRIALTGSPLQNNLMEYYCMVDFVREGFLGSSPEFRNRFQNPIENGQHMNSTAEDVKIMNQRSHILYEQLKGFVQRMDMNVVKKDLPPKTVFVISVKLSPLQRKLYKRFLKLYGFSDGRTDERMRKNFFAAYQVLAQILNHPGIPQLRSEDSKNGRRGSIVDIPDDCSSDENIDYNMVTGEKQRTMNDFQDKVDGYLQKDWWVDLLEKNNYKVSDFSGKMILLLDILSMSADVGDKALVFSQSIPTLDLIELYLSRVPRHGKQGKFWKKGKDWYRIDGKTESSERQKLVDRFNEPDNKRVKCTLISTRAGSLGINLYAANRVIIVDGSWNPTYDLQAIFRAWRYGQKKPVFAYRLMARGTIEEKIYKRQVTKEGLAARVVDRQQVHRTISKEEMLHLFEFDDDDEKSDAVTEISKQNEAAQSNLVDNSQKQKATLSRVGCDKLMQNLLQRHGPNWISSFHEHETLLQENEEERLTKEEKDMAWEVYRRALEWEEVQRVPLSESPVVPKPSPSIQTEPLPQPKGFNRSRFVNRNCTRTAHQLTLISQGRKIGSSTVCGECGRILRWEDVIPASKLSAVN

SEQ ID NO: 683 - protein, 1484 aa, Cucumis sativus
MEEKHEDVDDVGSASGDSFIDDSEDDGPSTSGKDDQLHLEEPLTEQEIEDLVAEFLEVESKAAEAQEALEKESLAKVEKEVREELALTLNGDDLETAIANEMAAFVEEWEVVLDELEIESAHLLEQLDGAGIELPSLYKLIESQASNGCFTEAWKKRIHWVGSQVTGDLLASVSDAEKTLQIERPVMRRHGKLLEEGASGYLQKKFSTHEIEGIGTEKLEVDWGSLNKVFSEGSKDSDTLFGSKNWASVYLASTPQQAAEMGLKFPGVDEVEEIDDVDGSSCDPFVAAAIENEKELDLSEEQKKNFRKVKEEDDAIFDRKLQIHLKQKRNQKRCKQVSQKDVSPRDEEQPVSLVDCLNPVSDDKVDKCRMGLSDDENGDVKIKVDIPNGSDASSDIDMERSMEHTASVLPSASSNFVEPLGSKRLNDMEEVITQTKKSRTNGVHNDENSPMKEHSALLNTICNTEQNDYDADSLPSTCPNEKIHCTACDQVVIKVYAHPFLRVIVCADCKSMMDDKKNVKEPDCSECYCGWCGHNADLVSCKSCKTLFCTGCIRRNLGVECLLKAQASGWHCCCCRPSLLQSLTTQLEEALGSEELTGSSSDSDSDNPNADINVTISSKRKRKKKIRRILDDAELGEDTKKKIAIEKERQERLKSLQVQFSSNSKMMSSAGFCGNLSEGASVEVLGDASTGYIVNVVREKGEEAIRIPPSISSKLKTHQISGIRFMWENIIQSIRKVKSGDKGLGCILAHTMGLGKTFQVIAFLYTAMRSADLGLRTALIVTPVNVLHNWRQEFFKWKPSELKPLRIFMLEDVPREKRAVLLAKWRAKGGVFLIGYSAFRNLSLGKHVKDRQMAKEICHILQDGPDILVCDEAHMIKNTKADITQALKQVKCQRRIALTGSPLQNNLMEYYCMVDFVREGFLGSSHEFRNRFQNPIENGQHTNSTLDDVKIMNQRSHILYEQLKGFVQRMDMTVVKKDLPPKTVFVISVKLSPLQRKLYKRFLDVHGFNNGKDSSEQLRKRSFFAGYQALAQIWNHPGILQLTKEDKYYVKREDAIENFLAGDSSSDENIDSNIGTGDKPVNANGNHQDKFVSGFFVKDWSNGLLHANSYKEVDYGGKMVLLLEILTMCSELGDKALVFSQSIPTLDLIEFYLSRLPRRGKRGKFWKKGKDWYRLDGRTESSERQKIVERFNEPLNKRVKCTLISTRAGSLGINLHSANRVIIVDGSWNPTYDLQAIYRAWRYGQTKPVFAYRFLAHGTMEEKIYKRQVTKEGLAARVVDRQQVYRTISREEMLHLFEFGDEENLEASTELDQGNGHTSHQIMTGHQGNVLKQKGPLSHGSCSSDKLMETLLGKHHPRWVANYHEHETLLQENEEEKLSKEEQDMAWEVYRKSLEWEEVQKVSPGDFISEQKLTTSNNAHPAPETIDLAQSRARNRFVSRKCTNLSHLLTLRSQGTKVGCSTVCGECAQEISWEDLNRDAKLGK

SEQ ID NO: 684 - protein, 1505 aa, Vitis vinifera
MDEEHEEVEDVESSSSDSFIDDLDNNESMTSGQDDGLHLEVTLTEEEIEELIAEFLDVESKAAEAQESLEEESLSKLEIEVREELAQTLQGNDLETAVAEEMANFKEEWEAVLDELETESAHLLEQLDGAGIELPSLYKWIESQAPNGCCTEAWKQRVHWIGSQVTGDTTESIIEAEKHLQTDRPVRRRHGKLLEEGASGYLANKLASDGNREAVTENAEVDWCSFNKCFSDHASEDSTLFGSEHWASVYLASTPQQAAVMGLKFPGVDEVEEIDDIDGNSSDPFVADAIANERAVDLSEEQKKKFKKVKEEDDANIDRKLQLHLKRRRYRKRSTQETIQKEDRLAENILDNSVLLNDYSQAVLREKTRGDGVSISNNNDDGACQSSKTEVSESLEMPDTLDKERPASNGNSSVLSGSVLPDSTETKGFKRSHDNGELDVDNKRFRTVIIDSDDETHEVGNVSNSLVNNMTKMEGQSVLQETEGDFVGSGSLPSKHMNGNFHCTACNKVAIEVHCHPLLKVIICGDCKCLIERKMHVKDPDCSECYCGWCGRSNDLVGCKSCKTLFCITCIKRNIGEECLSDVKASGWQCCCCSPSLLQQLTSELEKAIGSSSLTVSSSDSDSDDSDEDINVAISSKRRRKKKIRRILDDAELGEETKRKIAIEKERQERLKSLQVQFSEKSKMMNAASCNGNLSEDTSVEVLGDASKGYIVNVVREKGEEAVRIPPSISAKLKVHQITGIRFMWENIIQSIRKVKSGDKGLGCILAHTMGLGKTFQVIAFLYTAMRSIDLGLRTALIVTPVNVLHNWRQEFIKWRPLELKPLRVFMLEDVSRERRAELLAKWRAKGGVFLIGYSAFRNLSLGKNVKDRHMAREICYALQDGPDILVCDEAHMIKNTRADTTQALKQVKCQRRIALTGSPLQNNLMEYYCMVDFVREGFLGSSHEFRNRFQNPIENGQHMNSTSDDVKIMNQRSHILYEQLKGFVQRMDMSVVKNDLPPKTVFVMAVKLSSLQRKLYKRFLDVHGFTNDKVSSDKIRKRCFFAGYQALAQIWNHPGILQLTKEEKDYARREDGVENFLADDSSSDDNIDYNTVLGEKVRNKNEIQQGKVDSGLYQKGWWNDLLHENNYKEVDYSGKMVLLLDILTMCADVGDKALVFSQSLSTLDLIEYYLSKLSRQGKKGKCWKQGKDWYRLDGRTEGSERQKLVERFNDPLNKRVKCTLISTRAGSLGINLHSANRVIIVDGSWNPTYDLQAIYRAWRYGQTKPVFAYRLMAHGTMEEKIYKRQVTKEGLAARVVDRQQVHRTISKEEMLHLFDFGDDENPDILPERGKEEEHTTNQNMTGQVGNSLKDKLSLSHGSCSSDKLMESLLVRHYPRWIANYHEHETLLQENEEEKLSKEEQDMAWEVYRRTLEWEEVQRVPLDESTFERKPAVSNAAPLVTESISLSETKISRLRNHLVQRKCTNLSHMLTLRSQGTKVGCSTVCGECAQEISWEDLNRDGRAVR

SEQ ID NO: 685 - protein, 1469 aa, Medicago truncatula
MRVASGLAPGMLLGKIESHRNERDPEAVQTRVGLWGQSAIMKAVWDVTNGIRADLSQYDVVRGLTKLMTAGSGLAPSMLLGKIESHRNERDPEAVQTTKSQTANGKQQEQTEIANLNKENEASRKRIILPDMEGIPEDEVVNIESASGGSANDDSDDEGSSPSDIDDKLHLEEPLSEAEIEDLISELLEVESKAAEAQETLEEESLAKVESEVRQELEQTLQGDDLETAVADEMAAFKEEWEAALDDLETESSHLLEQLDGAGIELPSLYKLIEREAPDRCCTEAWKKRNHWVGSQATTEIASSVSDAEKYLQINRPVRRRHGKLLEEGASGFLQKKISPETLEPGKKETEGDWDVFNKIISDESGIDASFGSKTWASVYLASTPQQAALIGLEFPGVNEVEEIDDIDGNSTDPFVAAAIANEKELDLSEEQRRQFKKVKEEDDAIVDRKLQVRLKHRRHRKKSKQRETSTPILSMESHAQKSSSVDQFNPDTKEGTSDEGEILSDNNKAAGLNMEATKIKGFDANFHLDNEKPMGDGNLQDPPKYPLGDDIEQRGTKRLNDGELDADKKKGRADIMNSDDDIPVSSSGSSDSDDSDDSDDSDDSDDSETNVSISTKRRRKKKIRRILDDTELGEETKKKIAIEKERQERLKSLRVQFSASSFDTSSAGCNGSSSEGASIEILGDALAGYIVNVVREKGEEAVRIPPSISAKLKAHQIAGIRFMWENIIQSIRKVKSGDKGLGCILAHTMGLGKTFQVIAFLYTAMRSVDLGLRTALIVTPVNVLHNWRTEFIKWAPSELKRLKVFMLEDVSRDRRAQLLAKWRAKGGVLLIGYAAFRNLSFGKHVKDREMARELCHALQDGPDILVCDEAHIIKNTKADVTHALKQVKCQRRIALTGSPLQNNLMEYYCMVDFVREGFLGSSHEFRNRFQNPIENGQHTNSTQTDVKIMNQRSHILYEQLKGFVQRMDMNVVKKDLPPKTVFVITVKLSPLQRKLYKRFIDVHGFSNVKENQENLRKRSFFAGYQALARIWNHPGILQMAKEDKECVRPEDVVENLLVDDISSDDSDSNVLAGEKLKYTNDLPPRKDGNGFFIKGWWKDILQGKIFKEIDQSGKMVLLIDILTMSSDVGDKVLVFSQSIPTLDLIELYLSKLPRSGKRGKLWKKGRDWYRLDGRTESSERQKLVERFNEPLNKRVKCTLISTRAGSLGINLHAANRVVIVDGSWNPTYDLQAIYRAWRYGQKKPVFAYRLLAHGTMEEKIYKRQVTKEGLAARVVDRQQVHRTISKEEMLHLFEFGEDENPETLAELSEQSNPILAGDSLKHTVPHSNGSSYSDKLMESLLGKHHPRWIANYHLHESLLQENEEEKLSKEEQDMAWEVYRKSLEWEEVQRVPIGESVPDPKPEVSKAEEEQPEVETWQLSTKLRNRFTKRQCTNLAHLLTLRSQRIKIGGYTVCGECARVVRWEDLKK

SEQ ID NO: 686 - protein, 1447 aa, Ricinus communis
MEEKHKQVDDVEIVSSDSFIVDSDDDDDEPSTSGQDNGMHLEASHQNSFSCNFREPLTEQEVEELVAELLEVESKAAEAQEALEKESLSKVESEVREELGQSLHGDDLEAAVEDEMTAFKEEWETVLDELETESAHLLEQLDGAGIELPSLYKWIERQAPNGCQTEAWKSRAHWVGSQVTSEITEAVADAEKYLQSHRPVRRRHGKLLEEGASGFLDKKLSIDGTKDNVAENGDIDWDSLNKLFSSGSCKDVASFGSKHWASVYLANTPQEAAEMGLKFPGVDEVEEIEDIDGCSNDPFIAVAIANEKELILSEEQRKNYIKVKEEDDAIIDRKLQLHLKQRRRRKRSKQVMIMTTSNFLFCESRKSKRPNESGEPTNDAKKIRTVIIDSDDEADGINESVSSANRVVVESTLQENIGESGADGHLSQCVNEEFHCTVCHKICFEVHSHPLLKVIICKDCKCSIEKKMHVKDPECSECYCAWCGRSNDLVSCKSCKTLFCTTCVKRNIGEECLSEAQSSGWQCCCCSPNQLQRLTLELEKAMGSEDLMDTSSDSESENSDADIHVAIRKKNKKKKKIRRILDDAELGEETQRKIAIEKERQERLKSLKVQFTDKSKMMNTASCNGNLPEGASFEVLGDAATGYIVNVVREKGEEAVRIPPSISAKLKAHQVAGIRFMWENIVQSIGKVKSGDRGLGCILAHTMGLGKTFQVIAFLYTAMRSIDLGLRTALIVTPVNVLHNWRQEFMKWRPSETKPLRVFMLEDVSRDRRAELLAKWRAKGGVFLIGYTAFRNLSLGKNVKDRNMAREICYALQDGPDILVCDEAHIIKNTRADTTQALKQVKCQRRIALTGSPLQNNLMEYYCMVDFVREGFLGSSHEFRNRFQNPIENGQHTNSTANDVKIMNQRSHILYEQLKGFVQRMDMSVVKKDLPPKTVFVIAVKLSPLQRKLYKKFLDVHGFTKDIVSSEKIRKSFFAGYQALAQIWNHPGILQLRKDRDYVTREETVDNFIADESSSDENLDCNTIIGEKPRNANDFVQRKSDNGFFQKGWWNDLLQENNYKELDYSGKMVLLLDILTASSHVGDKALVFSQSIPTLDLIELYLSRLSRHGKKGKLWRKGKDWYRLDGRTESSERQRLVEKFNDPENKRVKCTLISTRAGSLGINLHAANRVVIVDGSWNPTYDLQAIFRAWRYGQTKPVFAYRLMAHGTMEEKIYKRQVTKEGLAARVVDRQQVHRTISREEMLHLFDFGDEENSDPLAEVGEEDKQVDDQNMSYKVGSSLKHKAPLSHVSCSSDKLMESLLGKHHPRWIANYHEHETLLQENEEEKLTKEEQDMAWEVYRRSLEWEEVQRVSLDESTFERKPPISNAVPSAPNTNSKGPPVRETSSSNVAPSKGILRCRMVQRKCTNLSHLLTLRSQGTKVGCTTVCGECAQEISWEDLNKDSRTAR

SEQ ID NO: 687 - protein, 1496 aa, Glycine max
  VARIANT 412: Xaa = Any Amino Acid
MLSRFYLKARLEMEGKTEDEVVDIESASSGSFNDDSDDEESLVPEKDDGMHLGEPLTEEEIQDLISELLEVESKAAEAQEALEEESLSKVESEVRQELKQNLQGDDLETAVADEMATFKEEWEAVLDDLETESAHLLEQLDGAGIELPSLYKLIEREAPNVCSTEAWKKRNHWVGSLATAEIAESIADAEKHLQVNRPVRRRHGKLLEEGASGFLQKKLCDETQEPIKTETRGDWDLFNKIVSDGSGIDASFGSKHWVSVYLASTPQQAALMGLKFPGVDEVEEIDDVDGNSTDPFIAAAIANERELDLSDEQRRQFKKVKEEDDAIVDRKLQIRLKHRRQKRKSKQREMSTPILLVENHIQKPSSVDTLSPAMKEGTNNDGKIVSDNGKDTCVLMGADNINVFDASHHLDXEKLTSTGGLSDDIEQRGIKRVKSGELDADNKKCRIVIIDSGNEAEVSENKLDCNTQEVKEDLCNNGGDSLPSECLDEKFWCTVCDKVALEVHPHPFLKVITCGDCNCLLKEKTHKKDMGQDCSEGYCTWCGGSNELVSCKLCKGLFCTKCLKKNLGVELYAGMQDTSWHCCSCHPNLLQKLSLQLEKAVGSADIIVSSSGSDSDSSDDSDDSDDSDAKVNVTISSKRRHKKKIRRILDDAELGEETKRKIAIEKERQERLKSLRGQFSASSFEMSSDGCNGNLSESASVEVLGDALAGYIVNVVREKGEEAVRIPPSISAKLKAHQITGIRFMWENIIQSIRKVKSGDKGLGCILAHTMGLGKTFQVIAFLYTAMRCVDLGLRTALIVTPVNVLHNWRQEFIKWRPSELKPLRVFMLEDVSRDRRPELLAKWRSKGGVFLIGYTAFRNLSFGKHVKDRHMAREICHALQDGPDILVCDEAHMIKNTKADVTQALKQVKCQRRIALTGSPLQNNLMEYYCMVDFVREGFLGSSHEFRNRYQNPIENGQHTNSTLTDVKIMNQRSHILYEQLKGFVQRMDMNVVKKDLPPKTVFVITVKLSPLQRKLYKRFLDVHGFTTQVHPEMLRKRCFFAGYQALARIWNHPGILQLTKEVKDYVKHEDAVENFLVDDSSSDENSDYNVLAGEKMRYANDLLQRKDDNGFFLKGWWNDLLHGKIYKEIDHSGKMVLLMEILTMSSDVGDKVLVFSQSIPTLDLIELYLSRIPRRSKREKFWKKGKDWYRLDGRTESSERQKLVERFNEPLNKRVKCTLISTRAGSLGINLHAANRVVIVDGSWNPTYDLQAIYRSWRYGQKKPVFAYRLLAHGTMEEKIYKRQVTKEGLAARVVDRQQVHRTISKEEMLHLFEFGDDDNPETLVDLSQDNEHQDNPILVGHSLKHTAPHSNGTSYSDKLMESLLSKHHPRWIANYHEHESLLQENEEEKLSKEEQDMAWEVYQKSLEWEEVQRVPLGESIMPEQKPEMPIAMPQNVSESCSILPTKLSRRFTIRKCTNLAHMLTLRSQGTKFGCSTVCGECAQEIRWEDLKKR

SEQ ID NO: 688 - protein, 556 aa, Zea mays
MVDFVREGFLGSTHEFRNRFQNPIENGQHTNSTSDDVKIMNQRSHILFEQLKGFVQRKSMNVVKNDLPPKKVFVITVKLSQLQRKLYKRFLDVHGFSSSGYSEKSHRSFFAKYQTLSQVWNHPGLLQMAKEQRGNLRREDAVENFMMDESSSDDNVENYLPNGEKQKDKADQQSKKSNIIMNEESNWWEELLDENTYMKADYSGKMTLLLDILSKSSELGDKVLVFSQSLTTLDLVEFYLAKLQINGKEGKHWKRGKDWYRLDGSTPSSDRQNLVEMFNDLENTRVKCTLISTRAGSLGINLHAANRVVLLDGSWNPTHDLQAIYRVWRYGQTKPVYAYRLMAHQTMEEKIYKRQVTKEGLAARVVDRQQVSRTISKEEMLHLFEFGEEELMEQNENGSTMIEKPSTSNTIKTSVPVPVDSLMLSLLSEQTRWISGYHEHEALLQENEEEKLTKEEQDLALSEWESLRKAASDPERKSSMSAVPTYPNPVRPLKPASRSRQLQQPKANSNNQKKCTNLTHLLTLRSHGTKAGCTTTCNECGQEISWETLNRDGRSR

SEQ ID NO: 689 - protein, 1483 aa, Sorghum Bicolor
MNKDGILSDDKMAKMESVQPNGQLVDIIIIDSQSDENKIGVDTSTSIGDSSLKEYKEPPCTTMDNNANEETSITDDDTESDSYESSLRESDNEQASASVEGTEVPLTEEEVEELVAEFLEVESKAAQAQESLEKESLDKVEIEVRLELSERLQGDELESAVSTEMEQFQMQWENELDDLEIRSSILLEQLDAAGIELPRLYKSIESQVPNVCETEAWKSRTHWAGSQVPEEANRSIKNADEYLQSRRPVRRKHGRLLEEGASGFLTGKIPVEDDDSVKCHEKSWSSFNELIKSKENAENTFGSSNWASVYLASTPQEAAALGLQFPGVDEVEEISEVGGVFDDIKGVDEVELSEEQRRKYRKVTEEDDAKIMKCLQRRLKGKRTRGWCKENIGLVSSCDEKPLPENGVLGAKSDLPSSKKLKTDENKVSMETLKHTFEDDDNEKRLKTVIIESDDDMQTDNKRALQKDGEGSSTEVEKVVDIIDLDLFPSQSPKLPTKSLPKTFKCTICSEMLNASDVHRHPVLDVVVCGSCRFLVIEKNRLEDPVSGGYCTWCARSELLQSCSSCKLLFCTNCLSKNLGEECLSEAKATGWQCCCCIPSQLELLISECDKALGGVESSDSESSNTELSGPENSATVSKRRMKKSIRRIMDDTELGEETKRRIAMEKARQDHLKSMQEQSATKLRSENIGTPFEAPVKICLQDAGDGHIVNLAREEDEEPVRIPSSMSSKLKPHQVEGIRFMWENVIQSVKKVKSGDKGLGCILAHNMGLGKTFQVITFLYTVMRCAQLGLRTALVVTPVNVLHNWRKEFSKWRPAELKPLRVFMLEDVARVKRPDLLTRWRVKGGVLLIGYSSFRNLSLGKHVKDKNSANEIAYALQCGPDILVCDEAHMIKNRRADITQALKQVRTQRRIALTGSPLQNNLMEYYCMVDFVREGFLGSTHEFRNRFQNPIENGQHMNSTSDDVKIMNQRSHILFEQLKGFVQRKSMNVVKNDLPPKKVFVITVKLSQLQRKLYKRFLDVHGFSSSGYSEKSHSSFFAKYQTLAQVWNHPGLLQMAKEQRGNLRREDTVENFMMDESSSDDNVENYLPNGEKQKDRADQQSKKSNIVNEESNWWEELLDENTYMEADYSGKMTLLLDILSKSSELGDKVLVFSQSLTTLDLVEFYLAKLQINGKEGKHWKRGKDWYRLDGSTPSSERQNLVEMFNDPGNTRVKCTLISTRAGSLGINLHAANRVVLLDGSWNPTHDLQAIYRVWRYGQTKPVYAYRLMAHRTMEEKIYKRQVTKEGLAARVVDRQQVSRTISKEEMLHLFEFGEEELMEQNENGSTIIEKPSTSDTIKTSEPVPVDSLMLSLLSEQTRWISGYHEHEALLQENEEERLTKEEKDMALSEWESLRKAALDSERKSNMSAAPTYPNVVRPLKPASRSRQLQQPKVNSNNQKKCNNLTHLLTLRSHGTKAGCTTTCDECGQEISWETLNRDGRSR

SEQ ID NO: 690 - protein, 1476 aa, Oryza sativa
MDENRKLSDDMSKKMEPIHSNGEAGEDKTIIIEPESDANKLEVETDARHGICEAHKAHEYGTMENDLHEEASTTDDDSENDSYEYLLRESDNEQTSESDAGEGDNEAPLTDEEVETLITEFLDAESKAAQAQESLEKESLEKIESEVRLELSESLQGNELESAVSTEMKQYKKEWESELDDLETHIAVLLEQLDAAGVELPSLYKSIESQVPNVCETEAWKNRAHWAGYQVPEEANKSIRKADEYLQSCRPVRRKHGRLLEEGASGFLAGKIPVGDDGSAQCHEKSWNAFNELTKSKEYAESSFGSSNWASVYLASTPQEAAALGLQFPGVDEVEEIAEVEGAVSDIKGVDEIELSEVQRRKYRKVPEEDDAKMTKRLQRHLKERRTRHLHKENIGLASSSNGCCELPPKKLKTYENGVSVELAKRTREDDVEFDNKRSKTVIIESDDDMQTDSKPDSAPSENADEIIDLDIFPSQSPKLGDKVRPKPFKCTICTEMLNVPEVHRHPVLDVIICGSCRFLVIEKNRLEDPVSGGYCTWCVKSEQLQSCSSCKLLFCRNCLSKNFGEEGLSEARVAGWQCCCCLPSQLEHLISDCDKALGGVESSDPENDFAELSVLESNGPFSKHKMKKRIRRIMDDEELGEETKLKIAMEKARQEHLKSMQEQSASKLKSNNIGISLEAPSEVSEYVGDGHIVNLAREEDEAPVRIPSSISAKLKPHQVSGIRFMWENVIQSVKKVKSGDKGFGCILAHNMGLGKTFQVITFLYTVMRCIQLGLRTALIVTPVNVLHNWKKEFIKWCPAELKPLRVYMLEDVPRANIQYLLKKWRIKGGVLLIGYSSFRNLSLGRSARDKTVANEITNALQCGPDILVCDEAHIIKNRRADTTQALKQVRTQRRIALTGSPLQNNLMEYYCMVDFVREGYLGSSHEFRNRFQNPIENGQHTNSTSDDVKIMNQRSHILYEQLKGFVQRMDMNVVKNDLPEKKVFVVTVKLSQLQRKLYRRFLDVNGFSSSAASEKSFQRSGFFAKYQTLALIWNHPGLLQMAKQKGNLRQEDVESFLMDESSSDDNIENYLPNGEKLRSRNDQLSKKSSDVVNEESNWWENLLDENAYKEADYSGKMVLLLDILSSCSELGDKALVFSQSLSTLDLVEFYLSKLQVNGKEGKYWKQGKDWYRIDGSTPSSERQNLVERFNDPENIRVKCTLISTRAGSLGINLHSANRVILLDGSWNPTHDLQAIYRVWRYGQTKPVYAYRLMAHATMEEKIYKRQVTKEGLAARVVDRQQVSRTISKEEMLHLFEFGDEELLEQSGSTMNGHSKVGTEKPPTPNSSETTEHLPLDRLMVNLLHDHSRWIASYHEHETLLQENEEERLTKEEQDMAWLSYNKLLEVAPRKATHDAERKPSTVPTESSLIQPPKATSRSRQPQQPKITSNNQKKCNNLSHLLTLRSQGTKPGCSTSCKECGQDISWETLNRDGRSR

SEQ ID NO: 691 - protein, 1502 aa, Brachypodium distachyon
MDGNGKLSVDELKNMEAGHSNGQPGVDIIIIEPERDENKVRGETNVGEGPFEDNREHKCEETDNGVHEEASTSTDDDSDSDFYFLRESENGRTSESDAEENGIEVPLPEEEVEELVAEFLDVESKAAKAQESLEKESLEKIEAEVRLELSERLQGDVLELAVSTEMEQFKNEWSTELDDLEIHSAVLLEQLDAAGIELPSLYKSIESQVPNVCETEAWKNRTHWVGSQVPEEANQSIRKADEYLQSCRPVRRKHGKLLEEGAGGFLAGKVPIGDDGSVQCHEKSWSSFNELIKSKECAESSFGSDNWASVYLASTPQEAAALGLQFPGVDEVEEIAEVEGDVDVIKGFDEIELSEEQRRKYKKVREEDDAKTIRRLRRQMKKRTRSCCKENFGLASSSNGFSELPPLSDNGVLGSSSGLLSSEKHKSDKNEVSGEPLKRAREDDFELDHKRPKTVIVESDDDMLINSKPALGNQVSDSSSAEVKKVVDIIDLDLLPSESPNFGDKALPKVFKCTVCTEMLNARDVHRHPVLDVTICGSCRFLVIEKNRLEGPVSGGYCTWCVQCEQLQSCSSCRMLFCTNCLSKNFGEECLSKAKVAGWQCCCCQPRQLEHLISECDKALSGVESSDLESDNTSGNESDGPVSKHKRKKRIRRIIDDTELGEETKRKIAMEKARQEHLKSMHEQSASKLSRSNIVTFSGVLSEVSLQDAGDGHIVNVAREEDEEPVRIPSSVSSKLKPHQVSGIRFMWENVIQSVRTVKSGDKGFGCILAHNMGLGKTFQVITFLYVVMRCVQLGFRTALIVTPVNVLHNWRKEFTKWRPDELKSLHVFMLEDVARVKRLQLLNKWRAKGGVLLIGYSSFRNLSLGRHAREKYTADEISNALQCGPDILVCDEAHMIKNRRADITHALKQVRTQRRIALTGSPLQNNLMEYYCMVDFVREGFLGSSHEFRNRFQNPIENGQHTNSTSDDVKIMNQRSHILYEQLKGFVQRMDMNVVKNDLPPKKVFVITVKLSQLQRKLYRRFLDVHGFSSGGASEKPLQRSGFFAKYQKLAQIWNHPGLLQMAKEQRGIVRREDAVENFLTDESSSDDNPNIENQLPDREKQKSKTDQQSKKSDFVNEESNWWENLLDANTYMEADYSGKMVLLLDILSTCYELGEKVLVFSQNLTTLDLVEFYLSKLQIKGKERKFWKQGKDWYRLDGSTPSSERQNLVERFNEPANTRVKCTLISTRAGSLGINLHAANRVVLLDGSWNPTHDLQAIYRVWRYGQTKPVYAYRLMAYGTMEEKIYKRQVTKEGLAARVVDRQQVSRTISREEMLHLFEFGDEESLDQCCNGSTIIDHTAVGTEKLSTSSSKTTELPVDKLMLNLLSDHSRWIAGYHEHEALLQENEDERLTKEEQDMAWSSFKKAQQLEAVPRRSHDPERKPNVIALPTQTSLVPPKVTSRSRQPQQPKTNSNQKKCTNLTHLLTLRSHGTKAGCTTSCTECGQDISWETLNRDGGRLR

SEQ ID NO: 692 - protein, 1410 aa, Populus trichocarpa
MEPLTDQEVEELVAEFLEVESKAAEAQEALEKESLAKVESDVREELARSLQGDDLEAAVEDEMATFREEWENVLDELETESYHLLEQLDGTGIELPNLYKWIESQAPNSCCTEAWKRRAHWVGTQMTKETTDTVADAEKYLQIHRPVRRKHGKLLEEGASGFLQKKLAMDGSEAIAENREVDWASMKKLFSTSSSEDVASFGSKHWASVYLANTPQEAALMGLKFPGVNEVEEIEDIDGNSTDPFVAEAIANEKELVLSEEQRKNYRKVKEEDDAKIDQKLQLRLKQRRRLKRCKQKDVCENSGDLDMEQLMSESNSVFPESDASEPRRSKRPNESEDLSINNKKIRTVIIDSDNEADILEDKSVHGIKVEDQSTLLENIGDPSAGCNPSQGSSEKFQCTACDKVAVEVHSHPLLKVIVCKDCKFLMEEKMHVKDPDCSECYCGWCGKNNDLVSCRSCRTLFCTACIKRNIGEEYLYKVPVSGWQCCCCSPSLLQRLTSQLEKAMGSGDIMVSSSDSDSDSSDTNDGVTISSKRKKQKKIRRIIDDAELGEETKRKIAIEKERQERLKSLKVKFSDKSKMMNFASCSGNLPEGASVEVIGDATTGYIVNVAREKGEEAVRIPPSLSSKLKAHQVAGIRFLWENIIQSIRKVKSGDNGLGCILAHTMGLGKTFQVIAFLYTAMRGVDLGLRTALIVTPVNVLHNWRKEFMKWTPSEVKPIRVFMLEDVSRERRVELLAKWRAKGGVFLIGYSAFRNLSLGKNVKERNMAREMCSALQDGPDILVCDEAHIIKNTRAETTQALKLVKCQRRIALTGSPLQNNLMEYYCMVDFVREGFLGSSHEFRNRFQNPIENGQHTNSTVDDVKIMNQRSHILYEQLKGFVQRMDMSVVKKDLPPKTVFVVAVKLSPLQRKLYKRFLDVHGFTNGRASNEKTSKSFFAGYQALAQIWNHPGILQLRKGREYVGNVENFLADDCSSDENVDYNTIVEEKSRNPNDFIQGKNDDGFFQKDWWNDLLLENNYKEVDYSGKMVLLLDILVMSSDVGDKTLVFTQSIPTLDLIELYLSRLPRLGKKGKFWRKGKDWYRLDGRTESSERQRLVERFNDPKNKRVKCTLISTRAGSLGINLYAANRVVIVDGSWNPTYDLQAIYRAWRYGQTKPVFAYRLMAHGTMEEKIYKRQVTKEGLAARVVDRQQVYRTISREEMLHLFEFGDDENSDTLIDIGQEYRQADTRNISSQTANSLKQNASRSHGSCASDKVMESLVGKHRQRWIFDYHEHETLLQENEEEKLTKEEQDMAWEVYKRSLEWEEVQRVSLDDSTFERKPPMSNGASSAPDASSIPVPSMARPASEASNGAPSQSILRSRMVQRKCTNLSHLLTLRSQGTKAGCTTICGECAQEISWEDLKREGKAAR

SEQ ID NO: 693 - protein, 1480 aa, Brassica napus
MEGKEEEMDRSEDIMDVEIEKEQNDEVMEENNNQDEEMQDTDLRSESSVSNSDEEEGLRSGNDDELDLEKPLSEEEVDELISDLLGVESKAAEAQESLEKESLSKVESEVREELAQTLHGDELDKAVEAEMMTFKDEWEATLDELETESANLLEQLDGAGIELPKLYEMIESQAPNGCYTEAWKKRAHWVGTQVTKETGESLAKAESFLLTHRPVRKRHGKLLEEGASGFLEKKFADDAVKECLTGTSELDWSSLNKVFSEKRDEAISFGSKHWASVYLASTPQQAAAMGLEFPGVNEVEEIEEIDESLADPFFADAIENERELALTGEQKKNYIRVKEEDDINIDRELQLRLKRKRRKKRSKQVIRHTAEDRDDDSAYLYGNSIAPDPAEDQVKCPENSIEFQNNEVNKQENGNLSNSDADKMVPVADLNVDTMRDDSQNPASNFRCTACNNVTVEVHSHPLLDVIVCMDCKRLIEDRVAKQLDASLERHCEWCGHVADLINCRSCEKLFCASCIKRNIGDEYLSEAQSSGWDCCCCAPIPLRRLTLELEKAMGDKKSMESSSDSSSDSSSDSSSDDNSVDTDADVTVAVSSKKKLKKKIRRIIDDAELGKDTRSKIAIEKKRQERLRSLQFSARYKTISSMGDVKIPEGAEAEVLGDAHSGYIVNVAREIGEEAVRVPRSISAKLKPHQVTGIRFMWENIIQSINSVKSGDKGLGCILAHTMGLGKTFQVIAFLYTAMRCVDLGLKSALIVTPVNVLHNWRSEFTKWMPSEVKPLRIFMLEDVSRERRLDLLRKWRNKGGVFLMGYAAFRNLSLGRGVKDINAAKEFCSALRDGPDILVCDEAHIIKNTRADTTQALKQVKCQRRIALTGSPLQNNLMEYYCMVDFVREGFLGSSPEFRNRFQNPIENGQHMNSTAEDVKIMNQRSHILYEELKGFVQRMDMNVVKKDLPPKTVFVISVKLSPLQRKLYKRFLKLYGFNDGRADERMRKNFFAAYQVLAQILNHPGIPQLRSEDKRQGRRGSIVDIPDDCSSDENLDCNMVVGEKQRNMSDLQDKVDGYLQKDWWVDLLQKNNYKVSEYSGKMILLLDILSMCAHVGDKALVFSQSIPTLDLIELYLSRVPRHGKHGKCWKKGKDWYRIDGKTESSERQKLVDRFNEPENKRVKCTLISTRAGSLGINLYAANRVIIVDGSWNPTYDLQAIFRAWRYGQKKPVFAYRLMARGTIEEKIYKRQVNKEGLAARVVDRQQVHRTISKEEMLHLFEFDDDDEKSDAVTEISKRKEAATSSRGCDSDKLMENLLQRHSPDWISSFHEHETLLQENEDERLTKEEKDMAWEVYRKALQWEEVQRAPVSEAPVLQKPSPSPQIQPLRHPRGFNRSRFVNRSCTRIAHQLTLVSQGRKVGSSTICGECGCVIRWEDVLPAPKLSESNHIIARGPRLIPNLAKISDDHVIGNSIWNRTRHYQDSQDSHCFIHLIDSG

SEQ ID NO: 694 - protein, 2001 aa, Arabidopsis thaliana
MKKDEKIGLTGRTIYTRSLAASIPASVEQETPGLRRSSRGTPSTKVITPASATRKSERLAPSPASVSKKSGGIVKNSTPSSLRRSNRGKTEVSLQSSKGSDNSIRKGDTSPDIEQRKDSVEESTDKIKPIMSARSYRALFRGKLKESEALVDASPNEEELVVVGCSRRIPAGNDDVQGKTDCPPPADAGSKRLPVDETSLDKGTDFPLKSVTETEKIVLDASPIVETGDDSVIGSPSENLETQKLQDGKTDCSPPANAESKTLPVGETSLEKEYPQKFQDDNTDCLPPANAESKRLPVGETSLEKDTDFPLKSTTETGKMVLYASPIVETRDDSVICSPSTNLETQKLLVSKTGLETDIVLPLKRKRDTAEIELDACATVANGDDHVMSSDGVIPSPSGCKNDNRPEMCNTCKKRQKVNGDCQNRSVCSCIVQPVEESDNVTQDMKETGPVTSREYEENGQIQHGKSSDPKFYSSVYPEYWVPVQLSDVQLEQYCQTLFSKSLSLSSLSKIDLGALEETLNSVRKTCDHPYVMDASLKQLLTKNLELHEILDVEIKASGKLHLLDKMLTHIKKNGLKAVVFYQATQTPEGLLLGNILEDFVGQRFGPKSYEHGIYSSKKNSAINNFNKESQCCVLLLETRACSQTIKLLRADAFILFGSSLNPSHDVKHVEKIKIESCSERTKIFRLYSVCTVEEKALILARQNKRQNKAVENLNRSLTHALLMWGASYLFDKLDHFHSSETPDSGVSFEQSIMDGVIHEFSSILSSKGGEENEVKLCLLLEAKHAQGTYSSDSTLFGEDHIKLSDEESPNIFWSKLLGGKNPMWKYPSDTPQRNRKRVQYFEGSEASPKTGDGGNAKKRKKASDDVTDPRVTDPPVDDDERKASGKDHMGALESPKVITLQSSCKSSGTDGTLDGNDAFGLYSMGSHISGIPEDMLASQDWGKIPDESQRRLHTVLKPKMAKLCQVLHLSDACTSMVGNFLEYVIENHRIYEEPATTFQAFQIALSWIAALLVKQILSHKESLVRANSELAFKCSRVEVDYIYSILSCMKSLFLEHTQGLQFDCFGTNSKQSVVSTKLVNESLSGATVRDEKINTKSMRNSSEDEECMTEKRCSHYSTATRDIEKTISGIKKKYKKQVQKLVQEHEEKKMELLNMYADKKQKLETSKSVEAAVIRITCSRTSTQVGDLKLLDHNYERKFDEIKSEKNECLKSLEQMHDVAKKKLAEDEACWINRIKSWAAKLKVCVPIQSGNNKHFSGSSNISQNAPDVQICNNANVEATYADTNCMASKVNQVPEAENTLGTMSGGSTQQVHEMVDVRNDETMDVSALSREQLTKSQSNEHASITVPEILIPADCQEEFAALNVHLSEDQNCDRITSAASDEDVSSRVPEVSQSLENLSASPEFSLNREEALVTTENRRTSHVGFDTDNILDQQNREDCSLDQEIPDELAMPVQHLASVVETRGAAESDQYGQDICPMPSSLAGKQPDPAANTESENLEEAIEPQSAGSETVETTDFAASHQGDQVTCPLLSSPTGNQPAPEANIEGQNINTSAEPHVAGPDAVESGDYAVIDQETMGAQDACSLPSGSVGTQSDLGANIEGQNVTTVAQLPTDGSDAVVTGGSPVSDQCAQDASPMPLSSPGNHPDTAVNIEGLDNTSVAEPHISGSDACEMEISEPGPQVERSTFANLFHEGGVEHSAGVTALVPSLLNNGTEQIAVQPVPQIPFPVFNDPFLHELEKLRRESENSKKTFEEKKSILKAELERKMAEVQAEFRRKFHEVEAEHNTRTTKIEKDKNLVIMNKLLANAFLSKCTDKKVSPSGAPRGKIQQLAQRAAQVSALRNYIAPQQLQASSFPAPALVSAPLQLQQSSFPAPGPAPLQPQASSFPSSVSRPSALLLNFAVCPMPQPRQPLISNIAPTPSVTPATNPGLRSPAPHLNSYRPSSSTPVATATPTSSVPPQALTYSAVSIQQQQEQQPQQSLSSGLQSNNEVVCLSDDE

SEQ ID NO: 695 - protein, 2034 aa, Arabidopsis lyrata
MKKDEKNSSAGRTICTRSLAASIPASAEHETPGLRRSSRGAPSTNLITPASATRKSERLAPSPASVAIKSGGMEKNYTPSPLRRSNRGKNVVSLQNSKGSDNSGRNADTSSYIEQRKDKRKNSVEESTNKINKQGPIMSARSFRALFRGKLKESEALVDVSPNEEELVVVGCSRRIPAGNDDAQGKTDCPPPANAGSKRLPVGETSLEKGTDFPLKSITDTENMVLDASPIVETGDGSVIGSPSENLETQKPQDGNTDCPPPANTESKRLVIGSPSEKLETQKLQDGNTDFGETSLEKKYPQKFQDGNTDCLPPANAESKKLPVGQTSLDKDTDFPLKSITETEKMVLYASPIVETRDDSVIASPSENLETQKPFVSKTGLETDIGLPLKRKRDTAGIELDACATVANGDDHVMSSDGVNPSPFGCKNDNQPEMCNTCKKRQKVNGDFQNLSVCSCIAQPVEESDHLTQDMKETGPATSREYEENGQMQHGKSSEPKLYSSMYPEYWVPVQLSDVQLEQYCRTLFSKSLSLSSLSKIDLGALEETLNSVRKTCDHPYVMDASLKQLLTKNLELHKILDVEVKASGKLQLLDEMLTHIKKNGLKAVVFYQAAQTPEGLLLGNILEDFVGHRFGPKSYEHGIYSSKKNAINNFNKESQCCVLLLETRACSQTIKLLRAEVFILFGSSLNPSHDVKHLEKIKIESCSERTKIFRLYSVCTVEEKALILARQNKRHHKAVENLSRSLTHALLMWGASYLFDRLDHFHSSETPHSGASFEQSIMDGVIHEFSSILSSKGEEENEVKLCLLLEAKHAQGTYSSDSTLFGEDHIKLLAEDSHSPNIFWTKLLGGKNPMWKYPSDTPQRNRKRVQYFEGSEESPKIGDGGNAKKRKKASDDVTDPPVDDDERKASGKDHIGALESPKVIALQSSCKSTSGADGTLDGNDTYGLYSMGGHISGIPEGMLAGHDWRKIPGESQRRLHAVLKLKMAKLCQVLHLSDACTSMVENFLEYVIENHQIYEEPATTLQAFQLALSWIAALLVKQNLSHKESLVRAKSELAFDCSRVEVDYIYSILSCMKSLFLERTQGLQFDCFGTNSKQSMVSTQLVNESLSGATVREEKNNTKSMRNSSEDEECITERRCSHYSTATEDVEKTISDIEKKWKKQVQKLVQEHEEKKLELLNMYADKKQKLETRKNVEAAVIRITCSRTSTQVDDLKLLDDKFERMFDEIKSEKNECLKSLEQMHEAAKKKLAEDKACWINRLKSWAQANLKVCVPMQSRNNKHLSGLCSSNISQNAPDVQICNDMNVEGTYADTNLPEAENTLATMSGGSTQQVHEMEAVRNDKKMDVSDLSHGQPTKIMVTKSQSNELASITVPEILVPAGCQEEFAALNVHLSENQNCDGITSAGPDEDVSSRVPEVSQPLENLAKSASPESSLNREEALVTTENNRTSHVVSDTDNIFDQQNREACSLDQDISDELALPMPHPASVVETRSATESDQDGQDISPMPSSLAGKQPDPAANTQGQNLEAAIELQSTGSETVETTDFAASHQGDQVTCPLPSSPAGNQPAPEANIGSQNINTSAEPHVAGSEVVESGDYAVSDQETMGAQDACSLPSASFGTQSDLGANNEGQNITTVAQLPTDGSDAVETGGSPVSDQCAQDASPMPLSSPGNHPDTAVNIEGLNNTTIAEPHISGSDACEMEIAEPGPRVERSNFASLVHEGGVEHSAGVTALVPSLLNNGTEQSAVQPVPQIPFPVFNDPFLHELEKLRRESENSKKTFEEKKSILKAELERKMAEVQAEFQRKFNEVEAEHNTRTTKIETDKNLVIMNKLLANAFLSKCTDKKVSPSAAPRGRIQQLAQRATQVSALRNYSASAPQQLQASSFPAPALVPAPLQLQQSSFPAPGPAPLQPQASSFASSVSRPSALPLNSAICPMPQPRQPLISNIAPTPSVSPAANPVPSASLRSPAPHLNSYRQSSSTSVATATPTSSAPPQALTYSAVSIQKQQQEKQPQQSLRSGGLQMNNDVVCLSDDE

SEQ ID NO: 696 - protein, 2801 aa, Cucumis sativus
MVKDTRSSVRERNEENNNLKGKQNGEKAPARAGSTTPDSSALRRSAREASLKKIIIVTPSKSRKSDRLDKHSPRTRSDKKKHGTIVQKDMLNPLRRSERVKKQSSSTSSGSGSKKLVKSSSTSSGSVSKKSDKSSGSPYTKEKKEKKEKSIEQLILDPREAGKSPKQDEVSQNAKDKRMDARAYRALFREKLKTGNVDCREQAKMPKSNDHCGSNSCKEDLNQSSKYSEKSKELRSSCLEKSSTRDLDDSNEIDTKELRSKCLEESSTVYLDDHPETRSKTSEEVLKNDSELDFFLSSQKSSEEEVLTKLSNEDSGTVHAVNDADKKLEALERSNSMLEEKIVDDFIDSNGGCKLISLKRKRSMLHLDSNVSVRNGSESTCSSPTEAVQLLSSPCRQSDQVGTCGDQVGTCGDQVGTCGDQVGTCGDQVGTCGDQVGTCGDQVGTCGDQVGTCGDQVGTCGDQVGTCGDQVGTCGDQVGTCGDQVGTCGDQVGTCGDQVGTCGDQVGTCGDQVGTCGDQVGTCGDQVGTCGDQVGTCGDQVGTCGDQVGTCGDQVGTCGDQVGTCGDQVGTCGDQVGTCGDQVGTCGDQVGTCGDQVGTCGDQVGTCGDQVGTCGDQVETCGKCLKRQRLGNDSLKDFCSCVEIDQQQNETISIDVDRGKSMGNSISDPTGNCVWCKLEKASLDIDPNACLICKVGGKLLCCEGKECRRSFHLSCLDPPLEDVPLGVWHCPMCIRRKIKFGVYAVSKGFESIWDTRETEISDADGSQRQKQYFVKFKDLAHAHNRWLPESKLLLEASSLVSRFIKKNQYSRWKEEWAIPQRLLQKRLLLSAKLCEEHDAEFSGAELNCRYEWLVKWRGLDYKFATWELGNASFLSSLDGQGLMKNYESRCERAKLASHVSEVDEKHELQILHRKRTAVANLSQFTDKDTCGFNDNYISYVNKLYQFWHEGKNAVVIDNQDRMAKIIAFILTLQPDVLRPFLVITTSTALGLWDSELLRFAPSFNAVVYKGNKNVRKNIRDLEFYQGSYPMFQALICSLEVMMEDLDILQRISWEVIIVDECQRPIICSHLEKIKMLDGNMWLLVLSDQLKDIKDDYHNLLSVLDVNDQVENKDTLKTNGDDNISKLKERLSYHIAYISTSRFVEYWVPARISNVQLELYCAALLSNSGLLCSSFKSDLLDNIHDLLISTRKCCNHPYIVDSSMGHVITKGHPEVEYLGIGIKASGKLQLLDAMLKEMKKKGSRVLILFQSISGSGRDTIGDILDDFLRQRFGPDSYERIDGGLIYSKKQAALNKFNNLESGRFLFLLEVRACLPSIKLSSIDSIVIYDSDWTPMNDLRALQRITLDSHLDQIKIFRLYTSCTVEEKVLMLSLENKTLDGNLQNISWSCANMLLMWGASDLLADLEKFHGKEKTEDALSDSTLLEEVVNDLILLISQNGRSTDKYDSHVILEVQQIEGVYSACSQLPGQLKKLSTEEMQPFIFWSQLLCGKHPKWKYSSDRSLRNRKRVQQTDDSLNKSEYEIEESVSKRKKVSNNNVKVAQEENFTHKEKEGTSKAPKHTCQNSTSLAACEDDSYIENHLSTSSLIANDILKILKYKSVGFDEIRKLTDLRKSLHCLLKPEISQLCKILKLPEHVKDEAEKFFEYVMDSHHILTEPATTTLLQAFQLSLCWSAASMLDHKIDYKESLALAKEHLNFDCHRQEVYLLYSRLRCLKKIFYKHLKCSKGTESPYNVLSDDEFQRAVVKSINRIQKTCRKKFKKLKQKQQEKRDEFDKTCDEEKSQLDRQFRMESVVIRSCLHNSLLMRNNKLQVLENRYAKKLEEHRYQMEIRCRKLEEEQIDERNKMVATEAHWVDTLTSWLQVELLNKQILNKTKHFHYLKNDTTICDHLPEEIYSKIAHSVSGTRKEIFEIPGSVFSEDIICSNTVEEGSLQTRHNGETAALDTMGSQGPSASEFVDDNGINISNGIEGNVTSENSCSVEKLPERVILGNPDKEISMKGPKSRCSVSVHMVSHVDEEVPHKLTEAAGLIESSTRVLTIPLLPSMERGGNVATLNPGIEISNATCRIGNSEPFVDAHSNLESSPRELNLPVNEVERLSEVANLVGVRKNLSASQSSSRESIPNKSMGSTSEIEFSSTMTVSASCEALEVGCSNSQNDGDNHRELVNPCVVEDTIGNTDPNVHSHEPSVTLSPLDLAVTPTTQGNVSLLFNEAAHEEMNQQSSSTRSIDYIMEAVEMAIVNGDPEAPISYVADQSNQEECENLQSSCTGSMENNMQATEMVNANEDTEAPITHVADQSNQEEQDEINLQSSCIGSMNDIRQTTAMVNTNGDNETPNPYVASQSNQEAQIVEPQTLTVPLATNSSVGFFQADLSSAGGMENQINCEDYSSDQLAQTASQPIEDSIELIEEALLQPVTCTAPHSIFNAGISDTRTSFTDTRSISGNFDISTGLMQPTQPSVSQMLPLSYVDPLEKELEKLRKEMEHNKDVHAKQKLQLKSEREKEIEEVNKKYDTKVQESEIEFDLRKKDLDVNYNKVLMNKILAEAFRWKYSDTKSWDIVPVLGPQIFQPTVMPILQRPPLVVRPSFTPSLVSSHTSNAPSVNIQRTSAVANLSTNSPVSSQGTTSTSIHGHHASPHFSSNSMRPLHIGSISSPTGNPQVSSVIRAPAPHLQPFRPKSSSLPPNPRGITSQHGPTIPSATPPSFPHHPPRPPVSSPFQSIPLNRPYRPNSLEQLPTLSSAPLSALDLLMDMNNRAGVNFPHNFPLPDASLNTHQPNPPVSTGNMQVNAVNTTGDSNVVCLSDDD

SEQ ID NO: 697 - protein, 2058 aa, Vitis vinifera
MTALLIRCCDGKGCKRSYHLACLDPPLGEIPPGIWHCMLCVKKKTELGVHAVSEGVESIWDTREVELPSAEGVQKQKQYFVKYKGLAHVHNHWIPESQLLLEAPSLVAKFNRKNQVIRYKLEWTVPHRLLQKRLLMPTKQSDGYYTGRAGDIPDCLYEWLVKWRGLGYEHATWELENASFLNSPEAQSLIREYENRRRKAKSASDPSITDKGRKASLVKLSKLPGAGSIGIDDNHLSCVNKLRENWHKGLNAIVIDDHDRVMRVVLFILSLQADVCRPFLIISTSSVLPLWEAEFSRLASSVNVVVYSGNKDIRRSIRTMEFYEEGGCIMFEVLLAPPEVVVEDLEVLECLGWEAVIIDECQRPRISSHFAEYRMLVADLRLLLFSGQIKESTLEFVNLLSFLDSGNDVNSSNVLKTDYNDSVSILKERLSQFIAYDCKSDSSRFVEYWVPIPLSNVQLEQYCGTLLSNTISLCSCSKNDPVGALRDVLISTRKCCDHPYIVDLSLQSFLTKGLPEIEYLDVGINASGKLQLLDRMISEIKNRGLRVLILFQSIGGSGRDSIGDILDDFLRQRFGQDSYERVDGGGVPSRKQAALNKFNNKESGRFVFLLEIRACLSSIKLSSVDTIIIFDSDWNPVNDLRALNKITIDSQFEKIKLFRLYSPFTVEEKSLILAKHDMALDSNLQNISRSTSHMLLMWGASYLFNKLEKFHGSDAPDSRTDTSSEQSLLKGVMQELLILLPHNGANIDLSNSSIIIKVKQNEISYCKNVTLHGELEIQSTDKVPPHVFWTKLLEGRYPQWKYSSGPSQRNRKRVQYFDESSKRSEHESDEVVKKRRKVDKGKLVTGDKEGASGISANNESQSLSRPTACTHDALHANRASTSPPLVSDISEASSEIHTIEFEGRRKLRDAQKSLHLVLETDISKLCDILQLSEDVKGMVGRLLEYVMNNHHVNREPASILQAFQISLCWTAASLMNHEIDRKGSLMLAKQHLAFTCKEEEVEYVYSKLHSLKEKFQYRSENLRVADFEQDLMSVSKGYLKNLLHGRESWELNHTKVKVEAEEIPLAQECSDKQVSSQQGQAEIATVENEISKSIKRIQKKCNKKMKKLLWKQQEEMKELDKIDEQEKAQLENDHKVESALIRSMYGLPLRTDKLEMLDKDYAKKIEEHKRQMSVQIKNLEAMHLAARNKEKQDAARWLQAVESWAQDELLRKLPLNDSACRAEDSQSGELGRCHAPTSFASGPAAFSKEQRQGMTQDEMGQSGVHETVPSNSVSSSHPIEILTLPVNPSSKDDRLATMASEKASVTGFEQHNRSGSSSNGPENIVSAHPLSSEDHIPDGAISSFPDRGIQSEVPDTCPDEVEVGDSNRENDEADTIASNRTNSIGGGDLHDEVSISTIGESLSQELPLVNSLPVQPLTSTEGAELPLNQALQAECFQPSSSSGMPDEVTTIGGEQDTLQQVEVTLLHPINDVLSEHTNCEGSRTPHNVSSASGIDHQPCTEGHSSFQNAQVPTEPVGIPVELSSNQAISQPIPQLAVECQLSSERHTSFHDVQAPARLVENPVELSNQAISQPSMNLEIEHQPSGEGHASFQNVQVAPLLGENPVELSNQAALQTGAHLATEQSSSELGSSIQNSQTPTQLVEDSVENTCREGGSSFQNAQTPTQLVESSVELLNQAVSQSVTHLAVHQPIDTLAGGSDTRTTPIISGLSNRPIQTAPPVPLRMPLPLHSDPLQNELERIRKEIDQTIKIHEDTKQQLKSDCEKEIEEVVAQLRGKYDAKLQDVEATFVLKKMELDINQKKVTMNKILADAFRSKCMDVKASGAPGVQQDAPRPSFTQQIYQLSLQQGSQRPSIASSSSFLGTPAAVPQTTVPPPVQVVHHSSALFSSVPTRPLHISPITPPTGNHQVGSDIRAPAPHLQPFRPAIPMSSTSLPSLMRGMPSQPAPSNPPSTSSTLPQLSQLPARLPLTSYQSCQQNSGQRLENPGGSLALNNPPISALELLMDVDNRIGPNPWNVLAPPSDTSSNLELLDTSEPRALDGTRAHAGLTSDVVCLSDDD

SEQ ID NO: 698 - protein, 2096 aa, Medicago truncatula
MVKSTRSSQKAKDEENNNGRVTRSSEKAKIKAHPNVSDTAGIRKSSREKPSKIIATSSSTQKSEQVEKGTLPAPETRRKSVRVEKMKTPSPLTRSGKTRNHSFSGPSDSKSAGSLGSISRQKLQKEKSVKHLTFEAKEVNENEEHNRESSQVKRKKMTALMYRSLFTQPKKDCLGNSDNNSKSNQEGDNSSGAKIDELSKGSCSDNKEVSKNGTLPSEDARAKETTVDSRIGDKSKGDNSSGAKIDELSKGSCSDNEEVSKNGTLPFKDGKAKETRVDSRTDEPRCQSKGDNSSGAKIDELSKGSCSDNEEVSKNGTLPFEDGKAKETRVDSRTDEPRCQSKADNSIGAKIDELSKGSCSDNKEVSKNGTLTSEDAKAKETRVNSRLSGPMTDLAENCATPGSFIPSNTPTYETSVVPRRVQPDCCGEETLPTLVSGDSVFDDDDLVNNNAGLGGGEKLAPSKRKAITMDIDSNVPSSLSKGDSSNLIPDALPSKLGGNESCSKRIRLDFNPTVEESRDPCATEDIDVIEATMQQKDKSDHASGTGHLKGTTVEDKNIHALLDSQSVVHPKEKVSSHIANRCKSDSYKLVEYWVPVQISNVQLEQYCNTLLSNASFLCSSPKIDSVGAIRDVLISIRKCCNHPYIIEESLQPLLLKGIEEVEYPSQKEKAVAYLNVGIKASSKLQLLDSMLTELRKNKLRALILFQPIGVSGKTSIVDILDDFLRQRFGEDSYERIDNCLTASKKQAATKIFNDKNNKRFFFLMETSACHPSIKLSSIDAIIIFDSDWNPMNDIRSLQKLTLDSQFESIKTFRLYSPFTVEEKALILSRQGKTLDINCPSSSRGLSHTLLMWGAVHLFDELRVFHDGATSTSNLKPLLEETVSQFSSCLADVGEDSDTSNCSILLKVQQHGGAYLANSPLFGELEFRSPDEESPQKFWNNLLVGRQFQWKYSCGSTQRSRRRVQPFNNLAGGTDLVNEGTTKKRLKVSNNNVDQPSSKSVGEKLPNGIKAGTFVDLVDKPQGNDDVESGKNGRVHDELRSLHLSLKPQITELCEVLLLPDNVRNVVDNFLEYVTNKHHFNWESVSIQSFQISLIRAAASLLNHKVDQKTILALSKEQLNFDCKQAEVDYSYSFLQCLKKIFVYRTGTYNDNSSPKVCKSLNGVSCTEVVQEVELFKKDLSKSIKKIQKKFVKMLNKVRLMYQEEKHRLRVVNEDEKAELERKYKIQLAMTRSCYPNEVVRTETLNILNVDHQKSIEELKCEHETRLKELEDEHSEHIRKYQVWEASWVEEVKSWAKNELLNIVASKGPGTGIDYLQMCDNVVESMIEAGAMVTETNSPSVGKTVKLQNSLVKHDRANEMDILVPNDQPISGSEDHNMTENQYSQENIISKHSHSREQNSDGATSMTDETNRSENFGHESQDGCERSNLGITSLPDYENATHTEHQCSDGVSSGVEGQIPVELQETTDKGDSVSISERQVQVEMPVTDNSTDCQLENANQLNPPSSMDQTSDKVSIDVPVVDGVLSSKPCQAVGLTGCQDKISLSNPPLEQQIPDGDVPVMEPENSHAVAECHMEPSINAMLVDNSTTDDQEGGVQGNVTSAPVPRPVNVMEPLGQGKELPSVKSAADKNSDGAMQNSSEQVQVASSSADVVPANQITVPSKQVHQLAAAEPSSNLALSGFSTVHLATEDEHQLNSVHSLPTHHSEPTSVVPNKDAGQSHSNSALGLHSNQVAVHPISNSDLDLLTASRVRAQCGYRRNLSNPLEMNNHPIQSTPPSSSRRLQHLSYDPLNIEFERIQKVIEQSSKNHEDTKLRLKSDFEKELAELRRKYDVKFQEIEVEFQQTKKTLDTNLNTVYVNKILANAFKSKCLDLKVSGASGVQHDSLPQHLHQLSRQQAATRPFLVSGSSSGESPVTSLPSPSIAPNSQHMLPPGYNMSGTFSSASARPPLINTTRSSIARDIQGGEIRAPAPHLHSSRPSISAPPSSFNPLQRGIPSQTAASNLRATSPSYAHVSPWQRPPSYQSNPQMGRRPDSAGRSALLGNFSSQSTKTPPNIISRLSDVAPANLSRSGPNSSSVVANSSHQAASQNLVCLSDDE

SEQ ID NO: 699 - protein, 1982 aa, Ricinus communis
MNSKAVGGKPSTISARETPTNRSMSSNPSGTRKSERLEKRTPTPLVKGKDKKQSTQSPLRRSERGKKQFSSSSSGSKKSNKNIGISVMKKKVKKEKSVKQLTFETEEVSRSKTQVEKKRLNARDYRALFNLQRKKVSVAGCGKELNLENKLSQECSSSDEGGASKNVGRGNECGRGKVEELRKIHTGRGSERTKEESNCSLSKPADEIVENNIGLDSSLSSQNHKFVEGAHLSEDGTSLENSKGGDCVLLSSHKTVSGKQDDCDEMAKKIVQSELVTPASSGGLPDSGGGLDIGSKDIPPKRKRNTDNIDSDSTALASSKDVCPPLANAIISSPHGSNFAESCATSFKKQSQNWPKPKSICKCKVNKLKSKLNDMNGFASLSTKSSHKMGNLKERLSKYIVNGSKSDSLKFVEYWVPVQISNIQLEQYCATLFSNSLFLCSSSKNDLVGALSDILVSIRKCCDHPYLMDPSPEDILTKDAKVVDILDIGIKASGKLQLLQAMLIEIRNRGSRVIVLFQVYALHRNSWKDKIGDILDDFVRQRFGQDSYERIDGCVNQKRKQAALNNFNNQKTRFVFLLESCACLPSIKLSSVDTVIIFGSDWIPANDLRNLRKITLDSQFEQLKVFRLYSSFTVEENVLILAKHDKILDSNVQSISRATTQSLLMRGASYLFRKLDEFQNSSILNTNRSSSFDESSEKDVIRDFLTILSQDAKDNNSSTFSVIVKAKLNQGTYVSDPPLPGERKSQVRDEEFPHRFWKKLLEGKQPEWTFTSGLSQRNRKRVQNSEDILKKPEGEHGEVVKKHKKAANNDVGQNHFESAPFEGNTDTGNNEGNLGGPSHNVHQLMSGSSDHLNASYANHAPSLQSLTNVILDEPSSNMAKSNERINVHDSQKSLHLLLKPDMAKLCEILKLPDNVKAMVQSFLEYVMNNHHVIREPATILQAFQISLCWTAASLLKHKIDHKESLALAKQHLNFGCKKEEADYVYSKFRCLKKVFLYHTGNVMLTCSSENSQSVTRVVNKEYLQARSGQELLQLGLAKQDFSKSIKDIERKCDKQMRKVSQKQQEEIVEFNKKYNEEKAQLEYKQKTEAAVIRLHSNSSMRKNKLKLLDIEYKKKFEELEQQMVIRRKDLEEMHMAARDKLKKRKACWLEGVKSWAQVELINKPPSNKIGHNQENAASVNSYLKKQNPEVIQGMQNKKVPLEVPETVSSDDDDDYLLPGVQSTNEQIFDGVRSDLPDGEAPLRISTAISLRDGLEVNVPSSREQFSNAEVPLGVSEAVSSSDGAEHTNKFTCNEHNNGPTVMRPQNLSMGGSEIANSVGSQENIQGLESSPEAVIGERDGVQALNLENATEVDEEDVVCIANKDPNSRMIAGYQHNEKVSSGAIESASNKAASDNSCKQQNEKALMERTISNDSSDKTAGLGQQDTGAASGVPETALIEEIQGGETSKEQDGMIEAIETVNNEDSQSLGKTAGLGQQDTELLSGVIETAPSDVGDGVECLLPTGSTRLQDGVASVSMNPDNLQQVDASVQRQNDIAASPENVDAHVAEHVLQMPPTESAISVNAMDLPSTSETQHQSNHEDFITCNIAGTSMPMVEDQVQCSDLAISQHGTHTTQHLPADIPVHGSGTHVSDTRTLPISSGVNNYTVQTVPPVRVPPLPFYHDPLQVELERLRKEADQIVNAHENTKLQLKSDCEQEVAQIRKKYEVKLQELESEFLMKKKEMDMNEKKVLMNKILAEAFRSKCMDVKASSAPGIHQEVPSGFVQQLLQRSSQPAIVTGLSSAGQPTSGQQIAIPSAHSTSSLHAAHHSPGHLSGNLTRPPHINNISPATGNLQIGSEIRCPAPHLQPFRPSASTTPSLAVGTSSQQVPSNPPTTSSPPFQPAFRPQPSTQQSHPHNNAHGPETTRFLPPLSRSSLSEIELLMEVDNQTNTNTNTNPSSNLRPLPSLGSDSDPVVRPELVLLNNTRASEACPSEVVCLSDDD

SEQ ID NO: 700 - protein, 1610 aa, Glycine max
MRVDTGLSGSVKDLVENNMTLGSLAPSNVALPSEDGKSKEMRVDTGLSGPVKDLVEDTMTLDSLAPSNAATYETGLAPESIHPDYCREETLQVLVSSNSILDEDSIRNSVGDDRGENLIPSKSKEITVDVDSDVSAMLAKGDNCNLTPDASSLSRLGGYIMGTDCPSNATLYETGLLPERVQPDCCREETLPSSNSKNGVLPSEDGKSKETRVDSGLSVPVKDLVENTVTLGSLAPSTAATYVASLAPESFQTDYRREKGNSILDEEDLISNSVGHDSSGETLVPSKRKGIMVDMDSDVSAMLAKGDNCNLVPDSGSPSQLGGNIMGIDGSCSKRIRSDYNPIDSESCIPSATELQDGDYIDASMLQKDSQIDNEKEPGLINNSNNSVTQLKERLSSHIGYRCKFVEYWVPVQISNLQLEQYCSILLSNASILRSSSKVDSVEAVRDVLISTRKCCSHPYLVGPELQPSLNKGLKPIEYLDFDLKASGKLQLLDSMLEELRKNDLRVVILFQSIGGSGRVIGNYLEDLLRPKFGSDSYERIDKSLPPSKKNAAMKKFNDKNNKRFVFLLETCACLPSIKLSSVDSIIIFDSDWNPMNDIRSLQKITLDSQFELIKIFRLYSSFTVEEKALILSKQCKIFDINSPSWTTCHMLLMWGASCLFDKLKVFHDGETSASNVKSLFGRPLLKEAMHEFSSLLSQDGEHIESSNFSTLLEVQQNGATYHANSSLLGELKLRVLGEEPPQIFWTKLLEGKQFQWKYLNSSSQRSRKKVHHFDGSVNRPDLVNEGAAKKRRKVSNNIVDQLSKSEDEKLSNGIKAGTSGDLLDGSQGNNAESEQKSGQHDEQRSLLLLLKPEIRKLCDVLLLPDNVKRMIDNFLEYIMSNHDVNREPFSILQAFQLSLCWTAASLLKHKLDPIASLIQDLNFECKKEEVDYICSMLRCLKKIFLYRTGNHHDTGSPKASGPSNRAYSRTGVAQVVELFKKDMSKSIKEIQKKCEKKLKKLLLLQEEEKQRLRAAIEEEKAKFEERYKIESAVIRSCSPNDVTRMEKLRVLNTEYVKGIEELKFQHDTCLKDLKDKQLAEIQKFQDKEAAWVKDVKSWADKEYLNIVASEELGTGVESLQTCDQVKPDNGLKNHLAGTAAKPPSSMEQKSDGGVVNELSDRELRLSNCPDNNTLLSPRNQNSGAPSNIPGLDRVLSPRACQAASSSDGPNTISFPNPLLEQQTTDGVPLSIPAAADCRDDIEHLTNAVLGDKRITSDQQKGAPETITELSQGTPVSRTVNVLDPPEQVQQLSVGSSPDHDTSGEMHVQRLPSAELPSSHLDSTNLPLTTEIEHQPTVVPNQDVQPDSNLELYSHSHEVVVHPASNSDPNTVTPSEVRVQSADTINLSIPLEINYQHMQAETHSASRMLHLSYDPLNNELDRIQKVTEQTMKNYEDKKLLLKTDFEKELEELRRKYDIKFQGIEVEFKQRKMALETNRNVVHMNKFLADAFRSKCSTLKSSCTSGMLPDSDIAQQQLLQPSRQQSASWRSLVNGSSSCGPSATSLQSPSTTTGSQHMVTPIRPGYSASVFPSNVSARSPIINTISLSVGNPQAGGGQIRAPAPHLQPYRP

SEQ ID NO: 701 - protein, 2254 aa, Zea mays
MANTRSGGGGDAPPPPSSPPAAASATATRKLADGRETRNTAAASAHTPNLRRSTRENKGKHKSRLADTPPLHRSAKTPTKDATAIATPKSTPLPNNPKDSTKKPSRVRNTSVSPSPSKQEPNETSTPASTKRKTQDDALTASTPSKKQKRLLHAKSYIALFNIGEESVLATLREDEEKASEVQPEGDGAVLVHEESNAPEQPNQEASNVVASEVLGGHSSDLHEIEVILEGDGLKIGSHQSDVVLERCILTETRSLNKAVESIPMLETGEQATGGSNQKPLLELPNSACSTAHHEEASKSVEDGNSIGIQGACTSRNTEAIQCDETWYDDNICVVCRSREISDILKSCGGKGCKRHYHLSCMDPSLDVSLGIWLCIMCMKKRIQFGVYSVSEGIESLWDVKEGVVNSKQYFVKYKNLAHVHNQWVSESDIVDSTPQGSDLISKVSKKIHKEKTIRWKQEWAEPHRLLKRRLLMPQKEAEVFFNSLGDKFVYCNVEWLVKWKDLGYEHATWELESSSFLCTPEAEELKRSYEDRFKTARKASDPSKVDKAKGGIFQQLERLPDGCPPGLDDDHLRSLNQLREFWHNSCGAIFIDDQERVIKTILFVASILPHICQPLLIVSTTTTLSLWETKFNRLAASINVVVYNGEKDVRKSIQDLEFYQDGSVMLQVLLSHPDAILEDIEVIERINWEAVIVDDCQNSRVSKWLEQLRRLPTNFRMVLLSSSLKESIAEHISLLSFLNPEENGTLSVSNGVSFDTAGTLVVLKEKLARYVAFERKTDSSKLLEYWVPARLSPVQLEMYCYILLSNSPALRSHSKTDSVGALRNILISLRKCCDHPYLVDQSLQSTLTKDHPVTDILDIGVRSCGKLLLLDRMLQQIRIQGLRVLILSQSGGESGKPMGDILDDFVRQRFGYESYERVERGLLLQKKQTAMNMFNDKTKGRFIFLIDSRACGPSIKLSSVDAIIIYCSDWNPMNDLRALQRVSMESQSEPVPIFRLYSSFTVEEKALILAKHDHILDSNIVNITPSLSHCLLSWGASFLFNRLEELQQHSYSNVSGDELFMDNVDLEFLTKLLSKVELRTESGNTAISQAYLCGSFYSRAIVVAGEREGIPSVDGDLPKFWAYWLSLLNGRSPQWQYISEPVQRSRRKINNMEQQLKNTDKQLKITTEETDEARVKRRRIGEIMDSSAIDSPGKNKDTILPGNNTPPSSHQISVEDTWQELERSNLHATQKGLHVQLKPEISKLYKLLQLPEKVKSLCEEFLEYILKNHQISQEPKGILHAFNLALCWRAASLSKHKINHTESLALAVKNLNYECKEELVDFVYGKLKILKKKFARRAGEVSKQNYMVSVSDISTCEQVTSVRLRNDELVPSQVTLTDGNFENGSHHEATGDFWTEEMVSGEKELLPDPVTHEGEHLLRDELLSKIMDKRIKLVDKVFSLRGRSIYDKHSNQVSFLDMHRQKVVDKLRRACSLVVEHLRSSQNHIAQEDRDGKIKLIIEWFTMLLYAFLEHMKCQRNRLDMQQSASRIKESQLKEETLQAARCGQLDQNFDQHIPSPDFEFAMEEFRHFREVVGSCYVDPAALVPESLDDNSAMEIMLVQSATDAEVIEEVLNRPTEVLVQGPASEVVGPSVDVICNCSDGINSQRDASLAVHSLEPSSDDLRSTDHVEENTVGSQIQGGTSKHLGDAAMEVETGNRNTALADSPHFDKPALTAPSRQATLLVSRETEMLSNLVDQCAQQSLVSAQPLQDESEQADLSSAASTQPLQSERQQLISVSNNLLERAQLDQSQPNYQTDAAPGCAQSTELFPVTSMMFNHAPIDSEPLKNELHKLRLHMDTLNKVHEMKKTQLQTACSQELEKVKRKYDLLIKEHDSTHLQQKKALGDFYEKVQRNQSLAEDFRAKFISLSAAQGAAKGHTPPVRHTPQATQVVSSTSSIALSSACRPPVPRPRVQAPQVDQPLLSLSQFSRPSLQVVQPPNLELGNLFRATSTTLSHMPPQRGSYGVQSELAPRSPAPHLQFRSPRAHSMAPGNQQQSPAISVDAMSSRTQPVLAASTSPSDIHVGPLAASALSSLHSVLPSTSLPSSLHPSHLAQRVPPTPNPTLQAGAPKGSNATMPSIPTGMQLPDSGSLSLDAWLTANLGLNDASTAPAKDTASLGLSSDAPRAAPDTNTASLGLSSDVPRGTAPATNTASLGLSSDVPRGTTPATTTTSLGLISDSPRVIAPASSNSPGAIASATNGGSEIDVVCLSDDE

SEQ ID NO: 702 - protein, 2265 aa, Sorghum Bicolor
MANTRSGGGGDAQLANGRETRSTTAAAAAASAQTPNLRRSTRENKGKHKSRQLPATPSSRRSAKTPTKDDTAIATPKSTSSPNNPKDSTEKPSRVRNTSVSPSPSKHDSNGTSTTASTKRKIQDDAQTASTPSKKQKRLMHTKSYVALFSTGQGQPESQVLAPLRQDKEKASDVQPEGDGAVLAHEESNALEQPNQEPSNVSAGKVLGGHSSDLHETEVILEGDGLKIGSHQSDVVLESCILTETCSLNKAVESIPMLETGEQAIGDSNQNSLLELQNSACSTAHHEEANKSLEDGDSVGVQGACTSRNIEAIQCDETGYNDNICVGCRSREISDILKSCGGKGCKRHYHLSCMDPPLDVSLGIWLCRMCIKKRLQFGVYSVSEGIESLWDVKEGAENSKQYFVKYKNLSHVHNRWISESDIVDSTPQGSDLISKFSKRIHKEKTIRWKQEWAEPHRLLKRRLLMPPKEAEVFFNSLGDKFVYCNVEWLVKWKDLGYEHATWELESSSFLCTTEAEELKRSYEDRFKAARKASDPSKVDKVKGGIFQQLQRLPDGCPPGLDNDHLRSLNQLREFWHNSRGAVFIDDQERVIKTILFVASILPHICRPLLIVSTTTSLSLWETKFNRLAASINVVVYNGEKDVRKSIQDLEFYEDGSVMLQVLLSHPDAILEDIKAIERINWEAVIVDDCQNSRVSKCLEQLKRLPTNFRMVLLSSSLKESIAEHINLLSFLNPEENGTLSVSNGVYFDTAGTLAVLKAKLARYVAFERKGDSSKLLEYWVPARLSPVQLEMYCYILLSNSPALRSHSKTDSVGALRNILISLRKCCDHPYLVDQSLQSTLTKDHPITDILDIGVRSCGKLLLLDRMLQQIRIQGLRVLILSQSGGGSGNPMGDILDDFVRQRFGYESYERVERGLLLQKKQTAMNMFNDKTKGRFIFLIDSRACGSSIKLSSVDAIIIYGSDWNPMNDLRALQKVSMESQSEPVPIFRLYSSCTVEEKALILAKHDHILDSNILNITPSLSHCLLSWGASFLFNRLEELQNPSYSNVSGDELFTDNVALEFLTKLLSKVEPSTESGNVAISQAYLRGSFYSRAVVVAGEREGISSVDGDLPKFCAYWLSLLNGRSPHWQHISEPVQRSRRKIYNAEQQLKNTEEQLKIPTEETDEARIKRRRIGEIMDSSPKDSPGKNKETTILPENNTPSSSHQISVEDTWQELERNNLHGTQKGLHVQLKPELSKLYKLLQLPENVKSLCEEFLEYILKNHQISQEPKGILHAFNLALCWRAASLSKHKINHTESLTLAVENLNYECKEELAEFVYAKLKILKRKFARRAGEVSKQNSMASVNNISTCEQDTSVRLRNDELIPSQVTLTDDNFENGSHHVATGDFWTEEMVSGEKELLSGPVTHEGEQLSRDELLSKIMDKRIKLVDKVFSLRGRSIQDKHSNEVSFLDMHRQKEVAKLKGACSLVVEHLRSSQNHIAQEDGDGKIKLIIEWFTMLLYAFLEHMKCQRDKLDMQQSVSRFKESQLKEETLQAAKRGQLDQNFDQHIPSPDFEFAMEEFRHFREIVGSCHVHAAALAPESLDDNSAMEITLVRSANAPEVIEEEALNRPAKVLVQGPAPEVVGPSVNVICNYSDGINSQGDAYLAVPSLEPSSDDLSTDHVEENTVGSPVQGDTSEHLGDAAMEVETGNRNTALADSPHFDTPALTAPSRQATLLVSREIEMQSNLVDQCAQQSLVSSQPLQREPEQADLSSAASDQPLQSERQQSIPPPNNLLERAQLGQSQPNYQTDVAPGSAQSAELFPVTSMMFNHPPIDAEPLKNELHKLRLHMDALNKVHEIKKTQLQTECSQELEKVKRKYDLLIKEHDSTHLQQKKALDGFYEKVQRNQSLAEDFRAKFISPSAAQGAAKAHTPPVRRTPQATPQVMRPPLLDSASSIALSSACRPPVPRPRVQAPQVDQASSSLLQLSRPSLPSLQVVQPPNLEQGNLFRTTATTLSHMPPPRGSYGVQSELAPRSPAPHLQFRSPRAHSMPPPGNQQQLPATRVEAMSSRTQPMLAASSCPSDIHVGHLAASAMSSLHSVLPSTSLPSSLHPSHLAQRVLPTPNPTLQAAAPSGSNTTMPSIPTGMQPPDSGSLSLDAWLAANLGLNDDASTAPAKNTASLGLRSDAPRAAPATNTASLGLSSDVPMGTAPATNTASLGLSSDVPRGMASATNTASLRLSSDSPRVTVPATSTASLRLSSESPGATAPAINGPEIDLVCLSDDE

SEQ ID NO: 703 - protein, 1274 aa, Oryza sativa
MPRKKASSPSPTSTARETRSSSARGHASPTPTPTLRRSTRETTSRFSSSSSSSANKHEGSPAKQSANNNTAKRKMNNAAADTSTRPIKKNKKLNAKSYLALFSTPQQTAKSPPAPAPPLLVQVDDDNASTVPMQDSGTLLEHEEADTQEQGYQSGLHKVPEVVLEETDVSKNKADEHASTSEPLIPVDLCSNDNASESSHGMEVKEQTVGCSNPCFVTDLPNRPCSIVHHEEAKKTIEAGDPREIKGASTSNQALVTHSDGTDYNEYLCAVCRSRETPGILKSCDGKDCKNRYHDSCLDPPLQYVSLGIWLCTLCTKKRLQFGLFAVSEGIESLWDVKEGVQNNKQYFVKYKNLAHVHNQWLPESDIIRTPGGQDLINKFCKRIQKEKTIRWKQEWAEPHRLLKKRPLMSEKEAEEFFNSLGDKFAYCNVEWLVKWKDLGYEYATWELETSSFLCTPEAKDLKRNYESRHEDARRGFDPAKINKGKQCLFQKLQKLPDGFPPGLDKDHLSSLNRLREFWHNSDGAICLDDQERVIKTILFSMSILPDVCQPLLIVSTSASLSLWEAKFNRLAPSINVVVYNGEKDVRKQIQDLEFYENGLVTFQVLLSHPDAILEDIQTMESIVWEAVMVDDCQSLRVSKCLEQLKHLSTNFRMVLLSFPLKESIPEYINLLSFLNPEGSVISSSSNGDFTDTGDILATLKEKFARHVAFERKADSSKFLEYWVPARLSRVQLEMYCYTLLSNSPALRSHSRTDSVGALRDILVSLRKCCDHPYLVDQSLQSSLTKGHSLTDILDIGVCASGKLLLLDKMLQEIRNQGRRVLIVSQSGGGAGNPMGDILDDFVRQRFGFESYERVERGLLVPKKQTALNMFNDKTKGRFIFLIDSRACVPSIKLSSVDAIIIYCSDWNPTNDLRVLQRISIESQSECVPIFRLYSSCTVEEKTLILAKHDHILDSNVQNVMPIVSHSLLSWGASFLFNRLEEFQKHDYSSKDSEDDGLFMNNVFLEFAAKLSTNVEASTKMENAVISRAQQSGSFYSRDIAVISEREGISAVDGDLPKFWTFWSNLLGGRSPHWQYISEPVQRNRRKIQNMEDQMRIPAEETDEAIMKRRKIGEIMDSSPKILPVKDNDAVLPENSTASSSHETSVDDTWQELGAESLQGTQKGLHTQLKPELSKLYELLELPETVKCLCEELLDYILKNHQVSQEPKGILHAFNIALCWRAASLLKHKINRRESLALSVRNLNYECDEVLAEYVYEKLRILKKKFSRRASETS

SEQ ID NO: 704 - protein, 2244 aa, Brachypodium distachyon
MANTRSGAGAQKDGAGDTGAGTSSTRKASAATKAKAPKSAMASTSSASELESRSSARQASDVQEPNLRRSSRETRGKNPNLKGAAGPSTPVSQKSTRGADTPKSSAKKLKGVAELTAKASTPRMSNRVKNSSVSGSTASNDSNGISSLVATPNKTAKRQIDEHDSMKNKHDGSESGSRPLKKQKRLTGRNYAKLFKKCSEVNEISPVSAPKVDEGNISMAHTEDNVSVSVYEESDAQEQDNQARLSQAVNKISKGSTSGLHEAPNMTLETDWNSAPVSEALMPTDLCSEVNVADSSLAMEAKEQTDGYSNESLVPESPNSPNSNIDSNEAKKSIEEDYSIRIQEACALKQTEVTQCDETDCDEHICVVCRSAETPGILKSCDGNVCKRKFHISCLGFPLECFSLGIWLCSICSKERLLSGVYTASGGVESLWDVKEGVQNCKQYFVKYKNLAHVHNRWTPESDIGHDLVSKFSKKNQKEKTIMWRQEWAEPHRLLMKRSLMPPKEAEEFFHSTGDKLAFCNVEWLVKWKDLGYEHATWELDTSSFLCTGEAEELKRNYENRHEAARKASDTAKIKKAKQSPFQKLRRLPDGCPPGLDNVHLSSLNQLREFWHNSRGAILVDDQAKFNRLAPYINVVVYNGEKDVRKTIRDLEFYDNGSMMLQVLLAHPDAILEDIETMKCIVWEAVIVDDCQISRVSKCLEQLKHLLADFRMVLLSSPLKENIVDYINLLSFVNSEGNDMSSISNVNSIDTPGTIAMLKSKLALHVAFERKADSSKFLEYWVPARLSRVQLEIYCYTLHSNSSALRSHSKTDSVGALRDMLLSLRKCCDHPYLADQMLQASLTKDRPATDILDIGVHASGKLLLLDKMLQEIRGKGMRVVILSHVQPGAGAGNPMGDILDDFVRQRFGFESYERVERNLPAQKKHIAMSMFNDKTKGRFIFLIDSRACLPSIKLSSVDAIIIYCSDWNPANDLRILQRISIESQSERVPIFRLYSSCTVEEKALILAKHDHVLDSNIQNITPILSHSLLSWGASFLFSRLEELKNNTYSSKDSDAEKLFMDDVLLESLTKLSTKVDISTKVSNAAISQADLSGTFYSRDIVLSGEREGISAPDGDLPKFWTFWFNLLNGKFPRWQYITEPEHRCRRKIQNMEEQGKVPANETDEASTKRRKIAEIVDPSPNVLAGKDKGSMLPENYMASSSQQISVGDTWQELGVENQHGTQKGLHVQLRPELSKLHKLLELPESVKCLCEEFLEYILKNHQVTQEPKGILHAFNIALCWRAASLLKHKVNRRESLVLAAKHLNYECSEDLASYVYDKLRILKKKFSHRAGGTSKHNQSTSVKNIPPYQEEISPKSGYDEPTVATVEGNLENGSHQEDTHDLLIEAIVPGEKEMLFVPEAHKNQHLSKDVLLGRITEKRIHLVNMVFTLREKNIRETQANEVAMLDMHRHNRVIKLREACKIVVEHLRKSHADPGRDCQIKLIIEWFTMLLYAYLEHIRYQHEKLYLLQSSVWTKELQLKENFLQEAKFGQLGDTFDQHIPLPDSGFSMEEFSHFSCCVDTFTLANCSQSLDDISAMEITLVRSVIPSEVTNAEVARNGSAEVLIHTEGGPASEGSGLTENRIQSNSDVIDSQGGASLTVQHEFSSSSVFHNSINQASSGGEHRGTEHVEGESGVGLQPLLGGTNQQIGGAGMEVNTSNGDSTLADTPHIEPPQTMAPVPGQASLQMSKEVDAIAMQSDQSSVALAQPLQEEAEQAGLCGSASAETLQSETQPSSSREIETQANLIIQSAQPSITPAQLPRREAEQAGLSHVASAPCMPTGMQPMTQVSNILLERTRPDLSEPSHRPEVAPGSVQSAQLFPVASMMFSHPPVGDEPLKNEVHRLRLYIDSLNKTHELKQSQLQTECTQEMEKVKQKYDLLLQEEDSTHLQQKKTLDDLCEKVLLNQSLADDFRAKFISSSGAQARAHSPPIRQAPQASQQIPTRPSGVTLTAPPIVSSSPGRSPLQVDRPSSLLQVSRTSSPSSHTVRPGPSIPANLVRSASAPFSQTPAASRGSYGVQGELARAPAPHLQRRLPPRAHQQQLPTRLEGASARTQSTPATPVRQSPSHALSQGNPSPSSSLSSSHPITPAAVRPSSPHQTHQGPPPQSSSSNPTRLLPPLSSISCASAQLTPPPGFNTSSSIVSSVASNVLPSGCVGPSVSGTRQSDSDSVSLDKWLNKNLGLSSEPPGATAGTDLVCLSDDDE

SEQ ID NO: 705 - protein, 2283 aa, Populus trichocarpa
MGNDTKASRKAKAEESKNNDVKGRNIASRSSTDKSGLRRSVREASSKKNVTPSPSSTRKSERLEKQTPTAPPATRKSERLVEKQSLSSPLRRSERGKNQSSSSSSGSKKSGKKSSSSVMKKKQKKEKSVKQLETKDVGNDKKHVIKAVLVETKRMDARAYKALFKRQQKKANLEGRCEEMKNKNADGNDCRDGASENVNGGSECSQRKVEELIDRCVLRDSEKNLEGNSIASEPVKEVLENNGGPKPPLKSQKLTFLEKDHQFKEGDSREDLNSDDSVLLSAQRTLSEPENDVAQMEQEQLPAELVDLTVNRTPRVDTEVESGYKEMPFKRKRSIEDLNSDATTMVSNKVADAAPYENGRTDSVAKCATSSKRQRCCDGQGCKRSYHLSCLDPPLGDVPLGVWHCLACVRKKIEFGMHSVSKGIESIWDASEVEVADDNGVQRQKQFYVKYKGLAHVHNRWLPENQLILEAPSLLAKFNQKNQVRKWKQEWIVPHHMLQKRSVMFPNQHVENFSHHASNILACQFEWLVKWRGLDYEHATWELEIAPFMNSPEAQSLIRDYENRLVKAKGAEYLSIIDKLSAGGSPEFDYNHLDFVNYLHDYWLKGENAVLIDDQEQITKVISFILSLSSNASWPFLIITTSASLHSWEEELFRLAPSLYAVVYHGNKDIRKSIRKLEFYSEGGCIMFQILVTSPEVIIEDLNVLESMKWEAVIVDECQSSRIFSHFKQIKMLRTAMRLLLVNGQLKDGITEHLLSLLVHQSDLNGSEDLVTNLSPKTGNLKDQLSKYIANSPRPDPSRFKEYWVPVQLSLMQLEQYCATLLSKSLSLCSSSRNDPVGALRDILISCRKCCDHPYIMNPSLQISLTKDRKEADILDIGIKASGKLQLLGEMLFSIKERGLRALVLFQSSGGSGKDNIGDILDDFVRQRFGQGSYERVDEHVLPSRKQSALKFFNNHQEGRFVFLLETRACSSSIKLSSVDTVIIFASDWNPMTDIRSLQKITLHSQFDQINIFRLYSSCTVEEKVLIIARQDKTLESSLHSISRAASDMLLMWGASYLFEKLSEFHCGNDTASSGNTLFEQSHLKDVIQEFLTIIIQKGKDNTPSNSIILKVKQNQGIYTTNFPLHGERKIQLLDEELPHIFWKKLLEGKQPRWKYSSGLSQRNRKRVQYADDIQKNTVVEGDEVVKKRNKVANNSTNSPSLKAALIGTSGAPVLNMSQFLPSSTGRLNTTATNHVSNFRHSNSNSSEVLKANKVEYNERMNLHDSEKSLHLILKPEITKLCEILQLPENVKVMVERFLEYVLNNHHISREPASILQAFLISLCWTSASMLKHKLGHKESLALAKQHLNFGCKKDEADFVYSKLRCLKKAFLHHTGTYKVATSPKAAEFSTEDHSKNQSNGRSSLSTPSNMQKGRIEVENLRPSQEFSIDQVVSHLGLAQKDYSKSIKDIEKKCDKQMRKLLQRQQEEMEEFEKKYEEEKAELEHMHRTEAAVIRLHSNILERTDKLKVLDNVYAKKFEDLNWQMDMHLNNLLELQLATRNKLQERKAQWIKGVKSWAHAELIKKPTANESGYNQENFVTWNSCCKEQTPERSRSMPDDVPLEVPETVSSSEDVLPGVLATSKPSSDGATSSMLDREVPLEVPQTATVRGVSEDVMSANSFPCEEQIPDLQVTLRVLEANCSSDGPENTIHKSSSEKGSDRVTLTVPDREFSLGVTGIVTSIGGLENAASVNPSPSEGQPHARSTSCMDVREVLLEAPETASLEAEEDVNRIMEKDGVSGMVSDNAIEVDQWNGVVCILNQEPHYDDMVAVNQQTGEVRLGVPENNVVNQQHEVDPSGVREAGVGHNQLEIDSMHVVASDNGQPTESSRLQDRVARVCNNQIAFQQVDALASQPFVASDHSHSDAPVTELLPSMDSSAGSQPTTSFAEHAPANSIAVGESGTRISNTMTAPVTSIISNCPVTAPAVRMPVSMSQDPLQNELDRICRETEQIIKIHEDTKLQLKSDCEKEIQEVVAQIRTKHDIKLQEIESEFLRKKKEMADNQNKVFLNKILAEAFRSKCMDNKASSTPVRQQEINSSIVQQQLQLSEPTARPYIVTGLYSTALPAASLQTTPTSSPPAPPRQVVHSSGRFSSTSTRPPHISSISPATSNLRIGNEIRAPAPHLQHFRPSARGMQSQQVSTTSPTPSEIPSRGPATAQQSSPQTTTNSGESMGISPSMTSLQGLESLMDIDNQTSTNATQAWSSPPPTDLSSDSNPLAQPKLSMLNSVLTNPISEVVCLSDDD

SEQ ID NO: 706 - protein, 1957 aa, Brassica napus
MKKDEKKKVSTGRTICTRSSAVASASTVLETTPLRRSTRGTPSTKPITPASSTRRSGRLASSPASVTKISGGTEKKPTASPLRRSGKGKTVASENPKGLSDKPDRNANTSSLGVEESNGKRIDIIEEESTDEIKKGKPEMTARSLRALYRGHLNTGSNASSNDEELVVVGCSRRVPAENDDARDDNSPPHANSGSKGLPVGDFSLEKGPDFPMEVARDTEKTVVDSSPMVETGDDSVIGSPSEDPEPQKLCDSETSLETDIDLALKRKRDTAENDDARDGNSPPHANSGSKGLPVGETGLEKGSDFPVEVTKDIEKTVVDSSPMVETEDGSVIGSPSENPEPQKLRDSETSLEADIDLALKRKRDTAEIVMDACTNADDRIMSTDGVIPFPPVCTNINQPERCGTCQKRQKVNDNFEDLSVCSCIAQPVQGSDQVAQDMKECGPAKSKDYGENRQKMQQDKSFDPKLLSIYTEYWVPVQLSDVQVEQYCRTLFSNSLSLSSMLKNDLVGALEETLTSVRKTCDHPYVMDVSLKQLLTKNLKLHEILDVEVKASGKLPLLGAMLTQIKAKGLKAVVFYQATHSPEGLLLGNILEDFLMQRFGQNSYEHGVCLSKKNAINNFNKESECFILLLEIRACSQSIKLLRAESFILFGSSLNPSHDVKLLEKIKVESCSERTKIFRLYSVFTVEEKALILARQNKPLENLNRPLTHALLMWGASYLFDKLEHFHGSGTPGSGVPFEQSIKDAVIQEFSSILSSHVGEENEGKLCLLLEAKHAQGSYSTDATLFGEEHVKLSDESPNMFWSKLMSGKNPMWKYCSDTPQRSRKRVRHLQGYEETTKVGNGGNLKKKKKASDDVTVDNAERKASGKDHMGHLESPNVATLKSSRGSASGTNDSLTGNGATGLYSLGCHISGVPEDMLAGIDWRQIPHESQRSLYAVLKPKMAKLCPSEDSASIAEKFLEYIIEHHRVCTEPATILQAFQIALSWIAVSLVKQTCNREESLVRAKSELGFSCSEEEVDYIYSLLCCMKSIFLGRTRSLQVDCLGTNSKQAKVNESLSGDTVRQEQSNTKSMRSSVTKDVEKTISDIKNKCSKKLQELVQIHEEKKVDLMNRSADKKQELQNGKKLEVLYIRVTCSGLSSQSLLDNLQRVEDDFERKNDDLKIEMNDCLKKLEGMHEAEKKKLAEDEAYWISRIENWAQAQAELIDCSPIQSGNNKHLSGLGTSNTSKNTPDVQTCNDASGEATYADTSSMVAKKNQLPEAENTLRTMSGGSTQQVHEIVASRNDKALVISPVSHEQPTDNVATKRQPNELASLSAPDILIPAGCQEESGALNVQSSEYPNCVRVTSAAPDEDVPSRVAEISQSVANLAKSASLESWLNREEALVSIENDKTIHSGSDTDNIFDHQYEEACSLYKEISDELVSPIPHPAPVLKTRDSAESHQGDDEICPLPSSPAGQQPDPAEKNQGKNVEASIESQPAVSESVETGGFAAFEQGDQVACPLPSSPTGNQPDSGANVESQNISTSEEPHNAGPGVVETGVTAVSDQEIMGAQDPCSLPTPLIGTQADLATNTEGQNITTVAQLHTAGSDAVETGRDASPLPVSSPGNQSEAAVSTEGLNNNTTMAAPRTTGSEACEMEVAEPDAQVEQPTFANVVDEGVVEPPAGVTAPVSSQLNNATGQNAPPPVPQVPFPVFSDPFRHELEKLRRESENTKKTYEEKISVLKAEFDRKMAELQAEYQRKFHEVEAEHTAKATKLQTSKNFVIMNKLLTNAFLSKCTSRMESHPSAAPRGRIQQLAQRAVQMSALMNYYTASSPAPLQPHTSSVSRSPSLPPSSTHCPMPQPRQPLISNPAPSFSASPASALNLAVNGRLVSPALHLNPYSSSSSPVPIPTTTTPTSSAVPQALTYSSSVPIPTTTTPTSSAVPQALTYSTALAQQQEQQAARTATELGKWIAEEQ

SEQ ID NO: 707 - protein, 635 aa, Arabidopsis thaliana
MAKNYTVADVVNIDSDSDSDDDNGGVIGMVPSLASLIENQKVSIADAATVAPRETLECRSFWKAGENFVIPSSVTLTAIGMVEHARVHPKFLHSNATSHKWAFGAIAELLDNAVDEIQNGATVVKIDKINIVKDNTPALVFQDNGGGMDPNGIRKCMSLGYSSKKSNTTIGQYGNGFKTSTMRLGADAMVFSRSTRGGKSTQSIGLLSYTFLRKTGQDDVIVPMIDFDISSDSPQPIIYGSPGDWSTNLNILLKWSPFSTMVELLQQFEDIGTHGTKVIIYNLWLNDEGIYELSFDDDDVDIRLRDENAQDGKRLHAKTLEVRSHISYRYRHSLRAYISMLYLKKFKNFKIILRGVSVAQFNIADEFRHPETIMYKPQAAAVDYAATGIKVGFIKEAPKLPICGFNVYHKNRLIRPFWKVVLEGSTRGNGVMGVLEANFIEPAHDKQDFERSSLFLRLEARLKRITSDYWQNHCHIFGYQTAQIPADKSKRTVIPDQPPTVNTYNPSPLPSDRISHGGPIIREINLSNATSSRTAAVAAPHLRNYTGLRNNFQPVQLNPQPPAAGDTGNNLVGKLAAEIREENLQLFMRCEEYVKKENEVEQTVKSLEKELEEIKSKCAQLALLVDAKKKEMQQV

SEQ ID NO: 708 - protein, 631 aa, Arabidopsis lyrata
MAKNTVADVVILDSDSDDDDGGGIGMGRSLTSLMENQQVSNADAATVAPRETLECRSFWKAGENFVIPSGVTPTAPGMVEHARVHPKFLHSNATSHKWAFGAIAELLDNAVDEVQNGATFVKIDKINIVKDNTPALVFQDNGGGMDPNGIRKCMSLGYSSKKSNTTIGQYGNGFKTSTMRLGADAIVFSRSTRGGKSTQSIGLLSYTFLRKTGQDDVIVPMIDFDISSVRPQPIIYGSPGDWSTNLNILLKWSPFSTMDEILQQFEDIGTHGTKVIIYNLWLNDEGIYELSFDDDDEDIRLRDENAQDGKRLYAKTLELRSHISYRYRHSLRAYISMLYLKKFKNFKIILRGIPVEQFNIADEFRHPETIMYKPQAAAMEYAATGIKVGFIKEAPKLPICGFNVYHKNRLIRPFWKVVLEGSTRGNGVVGVLEANFIEPAHDKQDFERSSLFLRLEGRLKRIISDYWQSHCHVFGYQTGQIPADRSKRIAIPDQPPTVSTFNPSPLPSDKISQGGPIIREINLSNASSSRTVAVAAPHLRNSTGLRSNFQPVQLNPQPAAADTGNNIVGKSADEIREENIQLFMRCEEYIKKENEIEQTVKSLEKELEEVKSKCAQLALLVDAKKKEMQQV

SEQ ID NO: 709 - protein, 596 aa, Cucumis sativus
MPRKTGSTPPDVVVLTSSDDEETAANTMSNKKTKSVTRLQEQRGSSTPIVSSSDKKTIDCRSFWKAGNLDFGLTGNPLPDDGDLEHARIHPKFLHSNATSHKWAFGAIAELLDNAVDEIHNGATFVKVDKVDIMKDNSPALLFHDDGGGMDPAGIRKCMSLGYSSKKSNTTIGQYGNGFKTSTMRLGADAIVFTRAVRGGTATQSVGLLSYTFLRMTNQDDVIVPMIDFDISGHWAEPIVNGSQDDWSSNLKTILEWSPFSSKEDLLIQFGDIGRHGTKVIIFNLWLNDEGIYELNFDDEDEDIRLRDEANQGGLRKLRKSVAELQSHISYRIRYSLRAYISTLYLKRFTNFNIILRGKPVEQHSIADDLKYSKVVKYKPHLHVVQASVETTIGFIKEAPAVGVCGFNVYHKNRLILPFWKVTGDGSFKGHGVVGVLEANFLEPVHDKQGFERSSAFIRLETKLKQMVMEYWKSCCHLMGYKPPGLYYLEKTKQASIGPAANIQNKLAKEQYDGPSEGSNNELNSTQDFDVSGKSYVDRICEENIELFRRCEDHATKEIKLQELVNSLEKKLKETKKKHAQLLLLVEAKRKLQNAK

SEQ ID NO: 710 - protein, 653 aa, Vitis vinifera
MSPMSLKPEKEGMDVVEIASSDDEGGVGVERRSNQQVQTDQVGQQTVVPLPPAEPPLSRSFWKAGAYDNTPSKLTPAPDQLEHARVHPKFLHSNATSHKWAFGAIAELLDNAVDEICNGATFVKLDRIDNRKDNSPALLFQDDGGGMDPESIRKCMSLGYSSKKSNTTIGQYGNGFKTSTMRLGADVIVFSRASRTSRATQSIGLLSYTFLRRTGQDDVIVPMVDFDISDHWAEPIIYSSKEDWSTNLKTILEWSPFASKEELMQQFEDIGPHGTKIIIYNLWLNDEGIFELNFDDDDEDIRLRDEANRGSLSKVPKKVAELQSHISYCIRYSLRAYASILYLRKFTNFQIILRGKPVQQFNIADELKYPKVVIYRPQHNTALKEASMETTIGFIKEAPALGVSGFNVYHKNRLIRPFWKVTSDGSSKGNGVVGVLEANFIEPAHDKQDFERSSLFIRLETKLKQMLMDYWKSNCHLMGHQPPGSRVQNMQKKHPAQSPVGHAAHIQKQLPANQHIVGLTANTKKEMNLDQPINCLTANLGQDVDNVQPGNRCRTSVREELPAVQPIIGLREGSFKEVTSADGSGLISVDKICEENIQLFMRCEEHMRKENELKQTISELERKLEEAKKKCAQLSSHLEIRRKQRILKSTEKI

SEQ ID NO: 711 - protein, 473 aa, Medicago truncatula
DPNSLRKCMSLGYSSKKSKTTIGQYGNGFKTSTMRLGADAIVFSRSTRSGRATQSVGLLSYTFLRRTGQDDVIIPMIDFDISGHWVEPIVYGTLDDWSANLKTILDWSPFTSKEELMLQFDDIGSHGTKILIYNLWLNDEGIYELSFDDDAEDIMLRDEAKNGNGKKLDKRTVQLQSHIFYRIRYSLRAYVSLLYLRKFSNFKIILRGKPVDHFDINDELIHSEVVRYKPQMAVMNEATVETTVGFIKEAPRLNVAGFNVYHKNRLIKPFWKVHADGSSKGNYVVGVLEANFIEPAHDKQDFERSLLFIRLEGKLKQIVYDYWKDHCHLVGFQPTNFRSQIGQKEARIRQSAGHLTNSRNEILADPHDICVAAEHQQIVNLHQPNEGLRATGKQCLTHEQGQGTSSGASPSVSIDAICDENIKLFTRCEEYRQKETELRKTVKHLEEELKEYQSKCAFVSSQIEAKRKQNNAR

SEQ ID NO: 712 - protein, 630 aa, Ricinus communis
MPPKLGRQPIDVVEIDSSSDDEDGVTVAATTDIKSNTKPQPQPRFQPQTQTQAPNHRGLECRSFWKAGAYDVGSTPRMATTQGQLEHARVHPKFLHSNATSHKWAFGAIAELLDNAVDEIHNGATFLKVDKIDIMKDNSPALLFQDDGGGMDPDSIRKCMSLGYSSKKSNKTIGQYGNGFKTSTMRLGADVIVFSRASRGSKATQSIGLLSYTLLLKTGQDDVIVPMVDFDVSGHWAEPIIYSSQDDWSSNLNMILEWSPFTSKDMLMQQFEDIGPHGTKVIIYNLWLNDEGIYELSFDDDEEDIRLRDEANRGGQIKLNQKTVELQSHISYRIRYSLRAYASILYLRKFTNFSIILRGKPIQQYIIADDLKHSKKAIYRPQLGVTSKEVAVETTIGFIKEAPNLGVSGFNVYHKNRLIRPFWKVTGEGATKGNYVVGVLEANFIEPAHDKQDFERSSLFIRLEAKLKQMLMDYWNNNCYLIGHQPPWIRPNTLKHTAKSHRQLPTNQHDAGFSVNAGEEIHLDQSLNDLSANLLHLPEDHPVTFSATGSYDEVSEDGPGSMLADQICEENILLFMRCEGHRQKQIELKHTITELEKELEQAKRKCAQLSAHLETRRKQKTVKEQTEKIT

SEQ ID NO: 713 - protein, 659 aa, Glycine max
MSLLPKTEQNDVPVVDIDSDDDGGAAVAPAKNDASSHKTPSPQVELVQQETPSSSSSLSASDGLSRSFWKAGDYVVGPSSKPAPFQGHLEHARVHPKFLHSNATSHKWAFGAIAELVDNAVDENQNGATFVKIDKLDVKKDNSPALCFLDDGGGMNPNAIRKCMSLGYSSKKSKTTIGQYGNGFKTSTMRLGADVIVFTCVTSRATQSVGLLSYTFLRRTGQDDVVVPMIDFDISGHWAEPIIYSSQHEWSANLKTILDWSPFTSKEELMLQFDDIGSHGTKVVIYNLWLNDEGIYELSFDDDAEDLSNSWYPSRNRDRVSREKDLKKGFLKLINGYYAERWATHGAEKNLCKKTVQLQSHISYRLRFSLRAYVSMLYLRKFSNFSIILRGKLVDQFNIVDDLIYSKVIPYKPQLAMASNEAIVETKTTIGFIKEAAEIKVTGFNVYHKNRLIKPFWKVVADGSSKGRCVVGVLEANFIEPAHDKQDFERSVLFIRLENKLKQMTMDYWREHCHLVGYQPPNLKSQKNVVKEAHIRKSAEHSTNPQNQLLADQQDTSLVAEHQSGLSQSVVGLAVTGMQGLRHEHLGTIVETPGSVSPDEICAENIKLFERCEEYRQKETELKQTVVDLEDELKQIQKKCTLLVSLVETKRKAKSVKGQ

SEQ ID NO: 714 - protein, 676 aa, Zea mays
MSLGAEVIELSSDEDEEPVPSTTALIHHAPSSPPDVKPHLLADVDVKPLLLLPPPLHPPGYGALVPVKTEEPVPVATVSSPPRALPPPRLCRQFWKSGDYVVARRNPDVAGPGGRNRLRINPKFLHSNATSHKWAFGAIAELLDNAIDEVNNGATFVRVNKFKNPRDGNPSLLVQDDGGGMDPEALRRCMSFGFSDKQSDAFIGQYGNGFKTSTMRLGADVIVFTQNQNNWVPTRSIGLLSYTFLMETGCDDVLVPTVDYQYDLTTTSYVQMLRHDQKLFSSNLAILLKWSPFSTEAELLKQFDDMGDHGTKIIVFNLWFNDDGDMELDFNSDKKDILITGAHKKVKTNSLDKIAAQNYVSTRLRYSLRAYASILYLHVPDTFRIILRGCDVEPHNVVNDLMYRECVLYKPQIAGLTESSVITTIGFVKGAPDIDVQGFNVYHKNRLILPFWKVANNSYGKGRGVVGILEANFIKPTHDKQDFEKSVLYQRLEFRLKEMTYEYWDLHCHRVGYDNKKLPKATRAINRANHMNGGSSPTSAPPRLLAVDIPTSSSSIPRLSASAAREKISSLDSLPKSMIGLKRKFNPFGAVAASADQDGLHHMDKIDVSQRRRFNEYKTLTLENDKLRNECLQYEGSEKQLVLKEQKLRSEIAEVEKKYQELLGELRSLDVKKEKQ

SEQ ID NO: 715 - protein, 599 aa, Sorghum Bicolor
MPLAMDGGGGGGGRALDCRSFWKAGAYEAPTAPTREFQDALETGDFDRARVHPKFLHTNATSHKWAFGAIAELLDNAVDERSNGATFIKVDKSINLKDNSSMIVFQDDGGGMDPEGVRRCMSLGFSTKKSKTTIGQYGNGFKTSTMRLGADAIVFTRAIRGSNVTLSIGLLSYTFLRKTMKDDIVVPMLDFKIQDGDIVPLVYGSQGDWDSSLKIILDWSPFSSKEELLQQFQDVGSHGTKVIVYNLWMNDDGLLELDFEDDDEDILLRDQGSASGGFSKSQKEIVMQHISHRLRFSLRAYTSILYLRKFDNFQIILRGKPVEQLFITEELKFKKVVTYKPQAAHDSQVAPVKIDVGFAKEAPILGIFGMNVYHKDRLIMPFWKVLQEGSSRGRSVVGVLEANFIEPAHDKQDFERTPLFIRLEARLRQIIIDFWKERCHLIGYQPLDPQLRSQYKATLKDSGGPGTQVHHKASSARRTGGLSSNLLPDTYDDITTVGLANNGSHSQSSGQAQENNMESEGLDEDLVEIGSSGVLDPNFIEKLSEENIALFSRREELRQRDTQLKQTIGGLEHELEETKKKCGQLAAQLKAWKNQQHLP

SEQ ID NO: 716 - protein, 629 aa, Oryza sativa
MAGGTGGAGGGGGRALDCRSFWKAGAFESASAPSREFHDALVAGDFDRARVHPKFLHTNATSHKWAFGAIAELLDNAVDEICNGATFIKVDKSVNLKDNSTMLVFQDDGGGMDPEGVRRCMSLGFSTKKSKKTIGQYGNGFKTSTMRLGADAIVFTRANRGSNVTLSIGLLSYTFLRRTMKDDIVVPMLDFKIQDGHIVPLVYGSQGDWDSSLKIILEWSPFSSKEELLQQFKDIVSHGTKVAIYNLWMNDDGLLELDFEDDDEASLHIIFVAIMACFLIDQRCKLYKDILLRDQDKASGGVTKAQKEIVQQHISHRLRFSLRAYTSILYLKKFENFQIILRGKPVEQIRIADELKFKKLVTYKPQVAHDSQVVSVKVDVGFAKEAPVLGIFGMNVYHKNRLIMPFWKVLQEGSSRGRSVVGVLEANFIEPAHDKQDFERTPLFIRLEAKLRQIILDYWKEKCHLIGYQPVDPQLRSQYKAALKDSGNPGPKSQQKASTSRRTGGHTSNLLPETYDDTEVIGLTANGSGSRVRSFGQAQENSMEPVGLDENSVDIGSEGALDPYIMEKLSEENIGLFTRREELRQRDTQLRQTVGELEQQLAETKKKCAQLADDLRIRKSQQQQQPPYI

SEQ ID NO: 717 - protein, 602 aa, Brachypodium distachyon
MPAVMTGGTGGGGGRSLDCRSFWKAGANEGPSAPIREFHDALETGDFDRARVHPKFLHTNATSHKWAFGGISELLDNAVDEICNGATFVKVDKSISPKDNSPMLVFQDDGGGMDPEGVRRCMSLGFSTKKSKTTIGQYGNGFKTSTMRLGADAIVFTRAIRESNVTLSIGLLSYTFLRRTMKDDIIVPMLDFQVQDGHIVPLVYGSQGDWDSSLKIIIDWSPFSSQEELLQQFEDMETHGTKVAIYNLWMNDDGLLELDFEDDDEDILLRDQGQTSGGSTRIQKEIVEQHISHRLRFSLRAYISILYLRKFENFQIILRGKPVEQISIANELKFKKVVTYKPQVAHDSQAVSVKVDIGFAKEAPVLGIFGMNVYHKNRLIMPFWKVLQEGSSRGRSVIGVLEANFIEPAHDKQDFERTPLFIRLETKLRQIIIEYWKEKCHLIGYQPTDPKLRTQYKAALKDSGDGARIQQKASTTRKAGGHLSNLLPDTYDDVAVVRLTANGAGSGLQSSGLALQNNMESAGLEEDLDIGSHGVLDPNFNERLSEENLALFTRREDLRQRDTQLKQTIGELEHQLEETKRKCSQLAAELQKRKSQQQLPYM

SEQ ID NO: 718 - protein, 657 aa, Populus trichocarpa
MPPKVEKQQPMNVVEIASSDDEVDIGPPPGMPRKTTPSSSKSRRQQPQKQQQQKQQQQQKQQQQDSSSEAIAAPVPAYQSLDCRSFWKAGAYDVGPIASKAPAQGQLEHARVHPKFLHSNATSHKWAFGAIAELLDNAVDEVHNGATFVKVDKIDIMKDNSPALLFQDDGGGMDPDGIRKCMSLGYSSKKSNTTIGQYGNGFKTSTMRLGADVLVYSCATRAGKATQSIGLLSYTFLRKTGQDDVIVPMIDFDISGNRAEPILYGSQDDWSSNLKTILEWSPFASKEELMQQFEDIGRHGTKIIIYNLWLNDEGIYELSFDDDEEDIRLRDEANHGQTKLHKKTVELRSHISYCIRYSLRAYASILYLRKFTNFSIVLRGEPVQQFNIVDDLKYSKTVSYKPQVGTIKEVTVETTVGFIKEAPALSVSGFNVYHKNRLIRPFWKVTGDAAVKGNGVVGVLEANFIEPAHDKQDFERSSLYIRLEARLKQMVMDYWKRHCHLLGILPPGVKSLDIQKQGAVKTQKPLPANRHNIDLPTNEEEMHLDQPITRSNRQLGSTGQSDLPVEESIIGLADGSYNGVISDDGLGSKPIDQICEENIELFMRCEEYAKKETELKQTVEELEKELEQAKRKCAQLASHLETKRKQKIMQQQSEKVA

SEQ ID NO: 719 - protein, 631 aa, Brassica napus
MSTNAKTVVAADVVHLDSDDEDVGGGGGGGRGLSLIETPQVPSTTADAAVAPLETLECRSFWKAGESYVTPNVVSQAAPGMLEHARVHPKFLHSNATSHKWAFGAIAELLDNAVDEIQNGATFVKIDKINIAKNNSPALVFQDDGAGMDPNGIRKCMSLGYSSKKSNTTIGQYGNGFKTSTMRLGADAIVFSRSTRSGKATQSVGLLSYTFLRRTGQDDVIVPMIDIDISKERPQPIIYGSSEDWSTNLDILLKWSPFSTKDELLQQFDDIGTHGTKVIIYNLWLNDEGIYELSFDDDDEDIRLRDESVHDGKRVHAKELERRSHISYHLRYSLRAYTSMLYLEKFKNFKIILRGIPVKQFNIADEFRYPEIIKYRPQIATIEQATTEIKVGFIKEAPKLPVCGYNVYHKNRLIRPFWKVTMDGSALGNGVVGVLEANFIEPAHDKQDFERSSLFQRLEARLKKIVYDYWSSHSHVFGYRTPQMPADKSKRIPIPDQPPPVNTFNPFPSPSSQGGPIIREINISNATSVRTVAAPPPHMRNSTGVRNNFQPVQLTPQPAVTDTRNKHVGKSVEEISQENIQLFMKCEEYVKKETEMEQTVRNLEKELEEAKSKCAQLAMLVDAKKKEMQQV

SEQ ID NO: 720 - DNA, 10450 bp, Artificial Sequence
  Synthetic Construct
accaaacactctcgacaggcctcactgcgacgaaccgtttcgatcgcgacccttcagttgtcgtctcccccaaacgaaaccctagcaaattcttccgagtctgctttcgcactaggtaggattctctcgctttggtaagcctattcttcgccgtcgcctaaatttcgagcgcttgatgaaaatgcttagaattaagtagccttgtaattcttaattaatcacgatttgtgctactcctcttttttatgtagaccatgatatatgccgcaaggatgctcgtgatctcggagaactgatgtatgcgtatgctgtaagtcttctcctttcgtgtagcttcaattgattagggtttttcaggtttcagagcaactgggttgggatttgctggtccgctttgtcttctactgttttacacaactaattatggttttgccttccagaacctgcaaaattttggatgcaattctcgtctctttaggtaaacgctattgcttcttctcttattttctaagtcaattgattctgggtaactttaatatcatgcttaaataaagttcgtggttattaattgtcgggatttagagctgagtttagttgtcttgtcgtaagatcttattgtgtgagatattaaataccagattgtttcacagatgcgtctttttagttgtggtaagtctcaggaggtgtgcttaacgtttccattattgacactttttcagtagcaactagcaagtgaagatggaggcaaacgaagaaagtttgaagggaaaaattgaaaagctagagggaaaggaggttattgtggagtcaaaagaggatgagatggatataataatagaagaaaatagggaagcagaacaggaggtaatggaggtgaaagcaagagatggaagaggggagcaaaatgatgtactgatggaagaaaacaacaatcagggtgagcaaaaagatgaggagatgcaagatgcttctagtagatctgaaagttctgacttcaattcagatgaagatgaacaaattctgtcccggcgtgatgatgagttggatcttgaggtatgcatcatggatatctcttgtttacttggcggaggaatagtgtatgtttatctaatatttcttttttcaattattgggcagaaacctttgagcgaggaagaaatagatgagttaatttcagatcttctggcagttgagagcaaggtatttaatctcttgcttttgttcaatggaaatctggataggcctatttaactttcaggtctaaatctcactctttatgattccccattgatctgaaggctgcagaagctcaagaagcactcgaaaaggagtctctttctaaagtagagagtgaagttagggaggaattagcacaagcactccgtggtgatgaggttaatttctttttctctctatcacagctacgggttcctttgctcttttccatttaaacattttaagagtgtgcctttttagttggatgaagctgttgctgctgaaatgatgacttttaaagacgaatgggaggcaactcttgatgagcttgaaacagaaagtgcaaccttgttggtatgtttcgttgttgcttcttctattcccacaaaacttactccaaagggttacttgtcatttaaagtaacttgcgcaactctgcttcccttttcgtttctttcttaaaggagcaacttgatggtgctggaatcgagcttccaaaattgtacgaaatgatagaaagtcaagcccctaatggttgctacactgaagcttggaagcaaagagcccattgggttggtactcaggtgacaaaagaaactgtggaatcattggctaacgctgagaggtttctgcacactcatcggcctgtccgaaagtagggtttttattatctttaacttttagttagttcatttactctgagtctcatggatggtatatctatacatttctggtgtagacgacatggaaaacttttggaggagggagctagtggttttctggagaaaaaactcgctgatggtgctgttaaagaatctctagctggaacatctgagcttgactggtcgtctctaaacaaagtgttttcggaaaaaagggatgagtctgtttcctttggtagtaagcagtgggcttctgtttacttggcaagcactccacaccaagctgcagccatgggattagaatttccaggagtcaatgaggttatattttcaatcatgcctttatattttctaacagtcctgatgctgatgatgatttgcatatgtttacatctgttaattttcgtcgctccaagaaaaaaagcattaaacgtgacatcccctttccttgatcgtttacttgccgttagacatcttaagaaagcatgcgtaattttcccattttgtttatttctgtttgcaagttgctgaatttttggcccgctgttatgccataatcatgacaggaaaacataacctactctgcaatgtaggttttcattaggatcaaaatattaagccaaactctataaataaattcgagcttatacttggttatcattagttgtagttgtagcagttttagatgatgcgaggcactatttacaaccttgggatgcaatcaggcttttattatcctagatcacgccatcctacagcttgagaatcttaattatactcctggcagtctggagtgattatcacagtatttattatttaattttgttgttaggtggaggaaattgaagagattgatgcaagcttagcagacccatttttagctgatgcaattgacaacgaaagagaacttgcccttactgaagaacaaaagacaaattatataagggtattacttttgacttaacttcttagatttctgttaccaagtcttcgaattttgaaagtattaccttttttggctgttagaacaaaataaaattatctaaaggtattagtgtttcacttaacttcttagatttctggaattaagcgttctacttttgaaattataaccttttctggctgctccttatgttcttgcttttgcggagttggcagtaaatctatatatatgaaataccatttaagactactcacaactcctgccttaccctttatgagcttcagtatgacattaaatcatctacaggtcaaagaagaggatgatataacttgtgatcgtgtacttcaacttcgtttgaaacggaaaagacgcaagaaaagatctaaacaggtctgttatgcatattctttcagttccttatcgtaactttgcatatatctgattgaaggcgtcttggtgttacaagtagcatagtcacgactatcttctttagtggatatcattcttaatgagcatggttttggagaatttagtcactgataggttgtgttttcctataattttcttagttaatattaatggtgattaaagtaccagaagatatattactgagaaatatacatttttagtataaagatgacaatttgcctgtaagtttagccctcacatcttgttgctcaattgtcaagtgatggttctttcttgtgttaaagcggcatttggggcttgtggtgccaggggtttcgttggtttgaaggaataatctttagctcacgtatcagtcttcatttggttttatatcaggttattaggtgtgcggcagagaatatggatgatgattctgtgtatttggatgggaataatactaccccaaattttgccaaagatcaagtgaaaagtccggagactagcactcaagttcataatagtgaagtcaacatagaggaaaacgggaatttttctaattcagatgtagataagatgacccccagcacacatattaatgtagatgccaagagagatgattcacagaatccagcaaacaattttaggtgtactgcctgtaataaagtagctgtggaagtgcatagtcatccccttttagaagtaatagtttgcatggattgcaaacgttcaattgaagatagagtttctaaggtatgcttttttcttcttccaattatatgtgacttactttgtttttgcatttgggtcagaatttagttagaaattagatttctttaatgtggtgaatagcatatcacatggatggcttcttttctgaaagggattgaaaggtaccaatcgtgttcatggactgctttttagccacccttaattggttagcttcaatatgattgctggtttggatattcaatgtgcgcaaattctgggggactggcacatggaaagattttctgttgccgtagtagattcagctgctttcctttgagtaacggacttcttttggtgcatgttacttttgttatttagagatcacatagaaatgttgccgtaatctaaagaatattgctatatctgtctctttctaatcaaaacgttgacttttgtctctttctaatcaaaacgtgacttttgcctacaggttgatgactctttggaacgtcattgtgaatggtgtggtcatattgctgacttaatagattgtaggacatgcgaaaaacttttctgtgcatcatgtataaagaggaatattggtgaagaatacatgtctgaagctcaatcctctggttgggattgttgttgttgctctccaattcccttgcaaagattgacactggaactggagaaagctatgagagataaaaagtcaatagaattgagctctgattcgagttctgattccagctctgataacaattctgttgatacagatgctgatgtcaatgtaacaatcaggtattatcatatactcatctaacaaaaattgaaaatttcagcatgttgccaactaatttggtatttttcttacgtgcatggtttttttcttttagctcaaagaagaaatcgaaaaagaaaattcggcggataatcgatgacgctgaactagggaaagatacgagaacaaagattgcaatcgaaaaggtgtttaattttttggcagttgcttttgttaaacttgtatataaacttcaaaaaaaaaattatttaagtattgctcgttgtacattgggttctttctttttgtaggcacgacaggagcgccttaggtccttgcagttttctgccagatacaaaacaattagctctatgggagacgtgaaatctattccagaaggtgcggaagttgaggttcttggtgatgctcacagtggttacatagtgaatgtggttagggagattggtgaagaagctgtgagggttcctcgtagcatatctgccaaactaaaagtccatcaggttagcatttacatatgtgtatccctatcatcataatatacttccatctcgcttgtcacctataccattgggtattaaagatagccatctcgactagaaatgcctattatggaaatagcttttgctgtaagtttggagttttttttttcaggtaacagggataagatttatgtgggaaaatattattcagtctatcagcagagtcaagtctggtgataaaggtcttggttgcattctagcacatacaatgggcctgggcaaaacttttcaggtgcttaattcttttcatgcacgaggctgtttggatatatcgtattatcgtccgattctattagtgcatactactaatggttaatcgttatttgttaattactggctctttatgtcttctctcacttaaacctattcaggttatagcattcctgtacaccgcaatgagatgtgttgatttagggttgaaaactgctcttattgtgactcctgtaaatgtgttgcacaattggcgaagtgagtttgagaagtggatgccttcagaagtgaaaccgcttcgcatttttatgcttggagatgtttcaaggtataaattcttctatgaaagaaacttttggtacttgacaattcagattcttatgttttctaatctagtctaggttttagatatttaaaataggggctgggtagtctatagtggtgtgccataacttatggcccataagactgctgaatgttacttatactaaagctatctgaagatcttttccctaatcaaagaatatagatgcaagccctctcgtccaaacacaagatctcagctgtcttaacttcctactaaactgacctattggcccatatatcaaacacttattttggcctatgtaagttgtatttttggtgacagtttctctatccacttcctgctcgaatgttttttttgaagggagagaagatttgatttgctaacaaagtggcgaaagaagggtggagtctttttgatgggatatacaaattttagaaacctgtctcttgggaggggggtgaaggacttaaatgcggccagagggatctgtaatgccttgagggtgagactataatgtcacttgcaaaattttattgatttctatcctgttaatattctaggtcattttaggaaagcgtttgacgtgctgtttatgtttacacattactttttgaaggttaatatttctgctatttaaaggccatatctgtatcatagattttgttgttttcatgttttctcttgtttatgatttcccttgtgcatatacctctgcttgcaatattttattcttgcaattcctaaacctatgtggctgcaggatggacctgatatacttgtttgcgacgaggctcacatcattaagaacaccaaggctgacacaacgcaagcattgaagcaagttaaatgccagagaagaattgccttaactggctcaccccttcaaaacaatctcatggagtattattgtgtaagttactgagggaactatataaaattgtgacctaattttttcttatctccagtatctttagctatgtctgtactgcaacagatggttgattttgtgagagaaggattcttgggaagtagccctgagtttagaaaccggcaagtctttcataccagtttttttttttttatctgtctattatgatgttatgtttctagagttttaactgtggttctccatacctgcagcttccaaaatccaatagaaaacggacagcatatgaattcaactgcggaggatgtaaaaattatgaaccagaggtcacacattctgtatgagcaattgaaaggttttgtgcaaagaatggatatgaatgtggtgaaaaaggatctgccacctaaaacagtcttcgtaatatctgtcaagctatctcccttgcaacggatattgtatcagagatttcttgagctttatgggttcagcgatggaagaacagatgaaaggatgagaaaaaacttttttgctgcttaccaggtcttggctcaggtataaatgtgataaaggccttgctatacttaaattaacaacttatttgagaaaaaaatgttaagaataataatgttaataactgatttatctggtattcgttttcatattctgaactctctctttggtattacgtctcccagattttgaatcatccagggattccgcaattaagaagtgaagatagcaagaatggtcgtcgtggtagcattgttgatattccagatgactgttcaagtgatgaaaatatagactacaacatggttacaggaggtaactcttaattggcactactcacatattttaagattttattaaactagtatgaagaatagaaggaacagaaaaacattggacttgttccatggttaagatagatgtcttttggttttgaattcaaggaatactaggtgcagtagatattatacctttttggtaccgttccagtttgaataagattgccaatagaggattagttttattggtctaagactttcttaccaagaataatctatgacatgcaatagttaagggaccttcgattcagcaatgttatgttttaagcttcatcatattctgtggagctttcaggagtgatctttctttgtttgcatctatgcaagttcaataatagtgagaaaagtattaataatctgtgtcattgttgttttggatattgacagagaaacagagaactatgaatgatctgcaggataaagttgatggatacctccagaaggtaactatagtttactcagcctgagtgaattagtaactactgcctataactttaaagtaaacagcagcgtaattgtgcacccatgctctgattctaaccctgtctttgtgccaggattggtgggtcgacctacttcaaaaaaataattataaggtgtcggacttcagtggcaaaatgattctgctattggatattttatctatgagtgctgatgtgggggataaggcgcttgtgtttagccagagtatcccgacattggatctcatagaactttatctttcaagagtacctcggcatgggaaacaaggaaagttctggaaaaaggggaaagactggtataggttggtatcttattctcttatattcgcgtgaatgttttttgaacaattatgaagactctaacttcccttgatggatgcagaattgatggaaaaactgaaagctcagaacgccagaagttggttgataggtttaatgagcctgacaacaaaagagtgaaatgtacactaatttcaaccagagcgggatcccttggaattaacctttatgctgctaaccgtgtgatcatcgtcgatggttcatggaatccaacctatgatcttcaagctatatttcgagcttggaggtattttctagactatggaattaaaatttgtcaatatagcattacaaacggtggcttattatacgtggacttattggttgcaggtatggccaaaagaagcccgtatttgcgtacagattgatggcacgtgggactattgaagaaaaaatatataaacgtcaggtattgaaaggcataaaacaatgttgaattttgctgtttctttccttcaaagagacattcatgaatcagatctgttaatatgattaggtaaccaaggaagggctagctgcgagagtagtggatagacaacaagtgcacaggactatctccaaagaagagatgttacatctttttgaatttgacgatgatgatgaaaaatctgaagccgtaactgagataagcaagcaaaatgaagcgggacatagcaatctggtggagcaagcaatcttgtggacaaagaaggccactttatctcgtgttggtggcgacaaattgatggagaacttactacagagacacggccccaagtaagtttcacaagcgtaaccatattcacatcagtacctaaaatctttggttttttatgctacttgctttgtaacactatatgtcctttttcactagctggatttccagtttccatgagcacgagacattgctacaagagaatgaagaagaaagactgacaaaggaagaaaaagacatggcctgggaagtttataggagagcacttgagtgggaggaagttcaacgggtcccattcagtgaatctccagtggttccaaaaccttctccttccacacaaacagagcccttgccccagccaaaggggttcaacaggagtcgttttgtaaaccgcaactgcactagaatcgcgcaccagcttacactcataagccaaggattaaaagtcggcagcagcacagtctgtggggagtgtgggcgcgtcataaggtgggaagatgttatacccgcatccaaactttcagcggtaattgtaaacggttcgaaatcgataagcttggatcctctagaccctttgcctgctgccgctgccgctgactacaaagaccatgacggtgattataaagatcatgatatcgattacaaggatgacgatgacaagggactagacttggctgccgctgccgctctcgagccttataaatgccctgagtgtggaaaatctttctctcaatctggagatcttaggaggcaccaaaggacccataccggtgaaaaaccttataaatgccctgagtgtggaaaatcattcagtaggagtgatcatcttaccacccatcagaggacccatactggtgaaaaaccttataaatgccctgagtgtggaaaatcattctcacaatcttcatctcttgttaggcatcagaggactcataccggagaaaaaccttataaatgccctgagtgtggaaaatcattctcaacatctggaaaccttgttaggcaccaaaggacccatactggtgaaaaaccttataaatgccctgagtgtggaaaatcattctctcagagagcaaaccttagggctcatcaaaggacacacactggagaaaaaccttataaatgccctgagtgtggaaaatctttctctaggagtgataagctcaccgagcatcaaaggactcacaccggactcgagtgaatagaacattgcaaaaatgttgagttcatttttccttcttttaaattatgagactgaaccaaaatttatgggaatagtaacatttgaaactcccttcagattagatgtgagttataatgtaactcagggcgtttggtaggagcatgttgaaatttgtaatgacacctgtttcgagattcaaa

SEQ ID NO: 721 - DNA, 738 bp, Artificial Sequence
  Synthetic Construct
accaaacactctcgacaggcctcactgcgacgaaccgtttcgatcgcgacccttcagttgtcgtctcccccaaacgaaaccctagcaaattcttccgagtctgctttcgcactaggtaggattctctcgctttggtaagcctattcttcgccgtcgcctaaatttcgagcgcttgatgaaaatgcttagaattaagtagccttgtaattcttaattaatcacgatttgtgctactcctcttttttatgtagaccatgatatatgccgcaaggatgctcgtgatctcggagaactgatgtatgcgtatgctgtaagtcttctcctttcgtgtagcttcaattgattagggtttttcaggtttcagagcaactgggttgggatttgctggtccgctttgtcttctactgttttacacaactaattatggttttgccttccagaacctgcaaaattttggatgcaattctcgtctctttaggtaaacgctattgcttcttctcttattttctaagtcaattgattctgggtaactttaatatcatgcttaaataaagttcgtggttattaattgtcgggatttagagctgagtttagttgtcttgtcgtaagatcttattgtgtgagatattaaataccagattgtttcacagatgcgtctttttagttgtggtaagtctcaggaggtgtgcttaacgtttccattattgacactttttcagtagcaactagcaagtgaag

SEQ ID NO: 722 - DNA, 8867 bp, Artificial Sequence
  Synthetic Construct
atggaggcaaacgaagaaagtttgaagggaaaaattgaaaagctagagggaaaggaggttattgtggagtcaaaagaggatgagatggatataataatagaagaaaatagggaagcagaacaggaggtaatggaggtgaaagcaagagatggaagaggggagcaaaatgatgtactgatggaagaaaacaacaatcagggtgagcaaaaagatgaggagatgcaagatgcttctagtagatctgaaagttctgacttcaattcagatgaagatgaacaaattctgtcccggcgtgatgatgagttggatcttgaggtatgcatcatggatatctcttgtttacttggcggaggaatagtgtatgtttatctaatatttcttttttcaattattgggcagaaacctttgagcgaggaagaaatagatgagttaatttcagatcttctggcagttgagagcaaggtatttaatctcttgcttttgttcaatggaaatctggataggcctatttaactttcaggtctaaatctcactctttatgattccccattgatctgaaggctgcagaagctcaagaagcactcgaaaaggagtctctttctaaagtagagagtgaagttagggaggaattagcacaagcactccgtggtgatgaggttaatttctttttctctctatcacagctacgggttcctttgctcttttccatttaaacattttaagagtgtgcctttttagttggatgaagctgttgctgctgaaatgatgacttttaaagacgaatgggaggcaactcttgatgagcttgaaacagaaagtgcaaccttgttggtatgtttcgttgttgcttcttctattcccacaaaacttactccaaagggttacttgtcatttaaagtaacttgcgcaactctgcttcccttttcgtttctttcttaaaggagcaacttgatggtgctggaatcgagcttccaaaattgtacgaaatgatagaaagtcaagcccctaatggttgctacactgaagcttggaagcaaagagcccattgggttggtactcaggtgacaaaagaaactgtggaatcattggctaacgctgagaggtttctgcacactcatcggcctgtccgaaagtagggtttttattatctttaacttttagttagttcatttactctgagtctcatggatggtatatctatacatttctggtgtagacgacatggaaaacttttggaggagggagctagtggttttctggagaaaaaactcgctgatggtgctgttaaagaatctctagctggaacatctgagcttgactggtcgtctctaaacaaagtgttttcggaaaaaagggatgagtctgtttcctttggtagtaagcagtgggcttctgtttacttggcaagcactccacaccaagctgcagccatgggattagaatttccaggagtcaatgaggttatattttcaatcatgcctttatattttctaacagtcctgatgctgatgatgatttgcatatgtttacatctgttaattttcgtcgctccaagaaaaaaagcattaaacgtgacatcccctttccttgatcgtttacttgccgttagacatcttaagaaagcatgcgtaattttcccattttgtttatttctgtttgcaagttgctgaatttttggcccgctgttatgccataatcatgacaggaaaacataacctactctgcaatgtaggttttcattaggatcaaaatattaagccaaactctataaataaattcgagcttatacttggttatcattagttgtagttgtagcagttttagatgatgcgaggcactatttacaaccttgggatgcaatcaggcttttattatcctagatcacgccatcctacagcttgagaatcttaattatactcctggcagtctggagtgattatcacagtatttattatttaattttgttgttaggtggaggaaattgaagagattgatgcaagcttagcagacccatttttagctgatgcaattgacaacgaaagagaacttgcccttactgaagaacaaaagacaaattatataagggtattacttttgacttaacttcttagatttctgttaccaagtcttcgaattttgaaagtattaccttttttggctgttagaacaaaataaaattatctaaaggtattagtgtttcacttaacttcttagatttctggaattaagcgttctacttttgaaattataaccttttctggctgctccttatgttcttgcttttgcggagttggcagtaaatctatatatatgaaataccatttaagactactcacaactcctgccttaccctttatgagcttcagtatgacattaaatcatctacaggtcaaagaagaggatgatataacttgtgatcgtgtacttcaacttcgtttgaaacggaaaagacgcaagaaaagatctaaacaggtctgttatgcatattctttcagttccttatcgtaactttgcatatatctgattgaaggcgtcttggtgttacaagtagcatagtcacgactatcttctttagtggatatcattcttaatgagcatggttttggagaatttagtcactgataggttgtgttttcctataattttcttagttaatattaatggtgattaaagtaccagaagatatattactgagaaatatacatttttagtataaagatgacaatttgcctgtaagtttagccctcacatcttgttgctcaattgtcaagtgatggttctttcttgtgttaaagcggcatttggggcttgtggtgccaggggtttcgttggtttgaaggaataatctttagctcacgtatcagtcttcatttggttttatatcaggttattaggtgtgcggcagagaatatggatgatgattctgtgtatttggatgggaataatactaccccaaattttgccaaagatcaagtgaaaagtccggagactagcactcaagttcataatagtgaagtcaacatagaggaaaacgggaatttttctaattcagatgtagataagatgacccccagcacacatattaatgtagatgccaagagagatgattcacagaatccagcaaacaattttaggtgtactgcctgtaataaagtagctgtggaagtgcatagtcatccccttttagaagtaatagtttgcatggattgcaaacgttcaattgaagatagagtttctaaggtatgcttttttcttcttccaattatatgtgacttactttgtttttgcatttgggtcagaatttagttagaaattagatttctttaatgtggtgaatagcatatcacatggatggcttcttttctgaaagggattgaaaggtaccaatcgtgttcatggactgctttttagccacccttaattggttagcttcaatatgattgctggtttggatattcaatgtgcgcaaattctgggggactggcacatggaaagattttctgttgccgtagtagattcagctgctttcctttgagtaacggacttcttttggtgcatgttacttttgttatttagagatcacatagaaatgttgccgtaatctaaagaatattgctatatctgtctctttctaatcaaaacgttgacttttgtctctttctaatcaaaacgtgacttttgcctacaggttgatgactctttggaacgtcattgtgaatggtgtggtcatattgctgacttaatagattgtaggacatgcgaaaaacttttctgtgcatcatgtataaagaggaatattggtgaagaatacatgtctgaagctcaatcctctggttgggattgttgttgttgctctccaattcccttgcaaagattgacactggaactggagaaagctatgagagataaaaagtcaatagaattgagctctgattcgagttctgattccagctctgataacaattctgttgatacagatgctgatgtcaatgtaacaatcaggtattatcatatactcatctaacaaaaattgaaaatttcagcatgttgccaactaatttggtatttttcttacgtgcatggtttttttcttttagctcaaagaagaaatcgaaaaagaaaattcggcggataatcgatgacgctgaactagggaaagatacgagaacaaagattgcaatcgaaaaggtgtttaattttttggcagttgcttttgttaaacttgtatataaacttcaaaaaaaaaattatttaagtattgctcgttgtacattgggttctttctttttgtaggcacgacaggagcgccttaggtccttgcagttttctgccagatacaaaacaattagctctatgggagacgtgaaatctattccagaaggtgcggaagttgaggttcttggtgatgctcacagtggttacatagtgaatgtggttagggagattggtgaagaagctgtgagggttcctcgtagcatatctgccaaactaaaagtccatcaggttagcatttacatatgtgtatccctatcatcataatatacttccatctcgcttgtcacctataccattgggtattaaagatagccatctcgactagaaatgcctattatggaaatagcttttgctgtaagtttggagttttttttttcaggtaacagggataagatttatgtgggaaaatattattcagtctatcagcagagtcaagtctggtgataaaggtcttggttgcattctagcacatacaatgggcctgggcaaaacttttcaggtgcttaattcttttcatgcacgaggctgtttggatatatcgtattatcgtccgattctattagtgcatactactaatggttaatcgttatttgttaattactggctctttatgtcttctctcacttaaacctattcaggttatagcattcctgtacaccgcaatgagatgtgttgatttagggttgaaaactgctcttattgtgactcctgtaaatgtgttgcacaattggcgaagtgagtttgagaagtggatgccttcagaagtgaaaccgcttcgcatttttatgcttggagatgtttcaaggtataaattcttctatgaaagaaacttttggtacttgacaattcagattcttatgttttctaatctagtctaggttttagatatttaaaataggggctgggtagtctatagtggtgtgccataacttatggcccataagactgctgaatgttacttatactaaagctatctgaagatcttttccctaatcaaagaatatagatgcaagccctctcgtccaaacacaagatctcagctgtcttaacttcctactaaactgacctattggcccatatatcaaacacttattttggcctatgtaagttgtatttttggtgacagtttctctatccacttcctgctcgaatgttttttttgaagggagagaagatttgatttgctaacaaagtggcgaaagaagggtggagtctttttgatgggatatacaaattttagaaacctgtctcttgggaggggggtgaaggacttaaatgcggccagagggatctgtaatgccttgagggtgagactataatgtcacttgcaaaattttattgatttctatcctgttaatattctaggtcattttaggaaagcgtttgacgtgctgtttatgtttacacattactttttgaaggttaatatttctgctatttaaaggccatatctgtatcatagattttgttgttttcatgttttctcttgtttatgatttcccttgtgcatatacctctgcttgcaatattttattcttgcaattcctaaacctatgtggctgcaggatggacctgatatacttgtttgcgacgaggctcacatcattaagaacaccaaggctgacacaacgcaagcattgaagcaagttaaatgccagagaagaattgccttaactggctcaccccttcaaaacaatctcatggagtattattgtgtaagttactgagggaactatataaaattgtgacctaattttttcttatctccagtatctttagctatgtctgtactgcaacagatggttgattttgtgagagaaggattcttgggaagtagccctgagtttagaaaccggcaagtctttcataccagtttttttttttttatctgtctattatgatgttatgtttctagagttttaactgtggttctccatacctgcagcttccaaaatccaatagaaaacggacagcatatgaattcaactgcggaggatgtaaaaattatgaaccagaggtcacacattctgtatgagcaattgaaaggttttgtgcaaagaatggatatgaatgtggtgaaaaaggatctgccacctaaaacagtcttcgtaatatctgtcaagctatctcccttgcaacggatattgtatcagagatttcttgagctttatgggttcagcgatggaagaacagatgaaaggatgagaaaaaacttttttgctgcttaccaggtcttggctcaggtataaatgtgataaaggccttgctatacttaaattaacaacttatttgagaaaaaaatgttaagaataataatgttaataactgatttatctggtattcgttttcatattctgaactctctctttggtattacgtctcccagattttgaatcatccagggattccgcaattaagaagtgaagatagcaagaatggtcgtcgtggtagcattgttgatattccagatgactgttcaagtgatgaaaatatagactacaacatggttacaggaggtaactcttaattggcactactcacatattttaagattttattaaactagtatgaagaatagaaggaacagaaaaacattggacttgttccatggttaagatagatgtcttttggttttgaattcaaggaatactaggtgcagtagatattatacctttttggtaccgttccagtttgaataagattgccaatagaggattagttttattggtctaagactttcttaccaagaataatctatgacatgcaatagttaagggaccttcgattcagcaatgttatgttttaagcttcatcatattctgtggagctttcaggagtgatctttctttgtttgcatctatgcaagttcaataatagtgagaaaagtattaataatctgtgtcattgttgttttggatattgacagagaaacagagaactatgaatgatctgcaggataaagttgatggatacctccagaaggtaactatagtttactcagcctgagtgaattagtaactactgcctataactttaaagtaaacagcagcgtaattgtgcacccatgctctgattctaaccctgtctttgtgccaggattggtgggtcgacctacttcaaaaaaataattataaggtgtcggacttcagtggcaaaatgattctgctattggatattttatctatgagtgctgatgtgggggataaggcgcttgtgtttagccagagtatcccgacattggatctcatagaactttatctttcaagagtacctcggcatgggaaacaaggaaagttctggaaaaaggggaaagactggtataggttggtatcttattctcttatattcgcgtgaatgttttttgaacaattatgaagactctaacttcccttgatggatgcagaattgatggaaaaactgaaagctcagaacgccagaagttggttgataggtttaatgagcctgacaacaaaagagtgaaatgtacactaatttcaaccagagcgggatcccttggaattaacctttatgctgctaaccgtgtgatcatcgtcgatggttcatggaatccaacctatgatcttcaagctatatttcgagcttggaggtattttctagactatggaattaaaatttgtcaatatagcattacaaacggtggcttattatacgtggacttattggttgcaggtatggccaaaagaagcccgtatttgcgtacagattgatggcacgtgggactattgaagaaaaaatatataaacgtcaggtattgaaaggcataaaacaatgttgaattttgctgtttctttccttcaaagagacattcatgaatcagatctgttaatatgattaggtaaccaaggaagggctagctgcgagagtagtggatagacaacaagtgcacaggactatctccaaagaagagatgttacatctttttgaatttgacgatgatgatgaaaaatctgaagccgtaactgagataagcaagcaaaatgaagcgggacatagcaatctggtggagcaagcaatcttgtggacaaagaaggccactttatctcgtgttggtggcgacaaattgatggagaacttactacagagacacggccccaagtaagtttcacaagcgtaaccatattcacatcagtacctaaaatctttggttttttatgctacttgctttgtaacactatatgtcctttttcactagctggatttccagtttccatgagcacgagacattgctacaagagaatgaagaagaaagactgacaaaggaagaaaaagacatggcctgggaagtttataggagagcacttgagtgggaggaagttcaacgggtcccattcagtgaatctccagtggttccaaaaccttctccttccacacaaacagagcccttgccccagccaaaggggttcaacaggagtcgttttgtaaaccgcaactgcactagaatcgcgcaccagcttacactcataagccaaggattaaaagtcggcagcagcacagtctgtggggagtgtgggcgcgtcataaggtgggaagatgttatacccgcatccaaactttcagcggtaattgtaaac

SEQ ID NO: 723 - DNA, 57 bp, Artificial Sequence
  Synthetic Construct
ggttcgaaatcgataagcttggatcctctagaccctttgcctgctgccgctgccgct

SEQ ID NO: 724 - DNA, 66 bp, Artificial Sequence
  Synthetic Construct
gactacaaagaccatgacggtgattataaagatcatgatatcgattacaaggatgacgatgacaag

SEQ ID NO: 725 - DNA, 27 bp, Artificial Sequence
  Synthetic Construct
ggactagacttggctgccgctgccgct

SEQ ID NO: 726 - DNA, 513 bp, Artificial Sequence
  Synthetic Construct
ctcgagccttataaatgccctgagtgtggaaaatctttctctcaatctggagatcttaggaggcaccaaaggacccataccggtgaaaaaccttataaatgccctgagtgtggaaaatcattcagtaggagtgatcatcttaccacccatcagaggacccatactggtgaaaaaccttataaatgccctgagtgtggaaaatcattctcacaatcttcatctcttgttaggcatcagaggactcataccggagaaaaaccttataaatgccctgagtgtggaaaatcattctcaacatctggaaaccttgttaggcaccaaaggacccatactggtgaaaaaccttataaatgccctgagtgtggaaaatcattctctcagagagcaaaccttagggctcatcaaaggacacacactggagaaaaaccttataaatgccctgagtgtggaaaatctttctctaggagtgataagctcaccgagcatcaaaggactcacaccggactcgagtga

SEQ ID NO: 727 - DNA, 182 bp, Artificial Sequence
  Synthetic Construct
atagaacattgcaaaaatgttgagttcatttttccttcttttaaattatgagactgaaccaaaatttatgggaatagtaacatttgaaactcccttcagattagatgtgagttataatgtaactcagggcgtttggtaggagcatgttgaaatttgtaatgacacctgtttcgagattcaaa

SEQ ID NO: 728 - protein, 1698 aa, Artificial Sequence
  Synthetic Construct
MEANEESLKGKIEKLEGKEVIVESKEDEMDIIIEENREAEQEVMEVKARDGRGEQNDVLMEENNNQGEQKDEEMQDASSRSESSDFNSDEDEQILSRRDDELDLEKPLSEEEIDELISDLLAVESKAAEAQEALEKESLSKVESEVREELAQALRGDELDEAVAAEMMTFKDEWEATLDELETESATLLEQLDGAGIELPKLYEMIESQAPNGCYTEAWKQRAHWVGTQVTKETVESLANAERFLHTHRPVRKRHGKLLEEGASGFLEKKLADGAVKESLAGTSELDWSSLNKVFSEKRDESVSFGSKQWASVYLASTPHQAAAMGLEFPGVNEVEEIEEIDASLADPFLADAIDNERELALTEEQKTNYIRVKEEDDITCDRVLQLRLKRKRRKKRSKQVIRCAAENMDDDSVYLDGNNTTPNFAKDQVKSPETSTQVHNSEVNIEENGNFSNSDVDKMTPSTHINVDAKRDDSQNPANNFRCTACNKVAVEVHSHPLLEVIVCMDCKRSIEDRVSKVDDSLERHCEWCGHIADLIDCRTCEKLFCASCIKRNIGEEYMSEAQSSGWDCCCCSPIPLQRLTLELEKAMRDKKSIELSSDSSSDSSSDNNSVDTDADVNVTISSKKKSKKKIRRIIDDAELGKDTRTKIAIEKARQERLRSLQFSARYKTISSMGDVKSIPEGAEVEVLGDAHSGYIVNVVREIGEEAVRVPRSISAKLKVHQVTGIRFMWENIIQSISRVKSGDKGLGCILAHTMGLGKTFQVIAFLYTAMRCVDLGLKTALIVTPVNVLHNWRSEFEKWMPSEVKPLRIFMLGDVSRERRFDLLTKWRKKGGVFLMGYTNFRNLSLGRGVKDLNAARGICNALRDGPDILVCDEAHIIKNTKADTTQALKQVKCQRRIALTGSPLQNNLMEYYCMVDFVREGFLGSSPEFRNRFQNPIENGQHMNSTAEDVKIMNQRSHILYEQLKGFVQRMDMNVVKKDLPPKTVFVISVKLSPLQRILYQRFLELYGFSDGRTDERMRKNFFAAYQVLAQILNHPGIPQLRSEDSKNGRRGSIVDIPDDCSSDENIDYNMVTGEKQRTMNDLQDKVDGYLQKDWWVDLLQKNNYKVSDFSGKMILLLDILSMSADVGDKALVFSQSIPTLDLIELYLSRVPRHGKQGKFWKKGKDWYRIDGKTESSERQKLVDRFNEPDNKRVKCTLISTRAGSLGINLYAANRVIIVDGSWNPTYDLQAIFRAWRYGQKKPVFAYRLMARGTIEEKIYKRQVTKEGLAARVVDRQQVHRTISKEEMLHLFEFDDDDEKSEAVTEISKQNEAGHSNLVEQAILWTKKATLSRVGGDKLMENLLQRHGPNWISSFHEHETLLQENEEERLTKEEKDMAWEVYRRALEWEEVQRVPFSESPVVPKPSPSTQTEPLPQPKGFNRSRFVNRNCTRIAHQLTLISQGLKVGSSTVCGECGRVIRWEDVIPASKLSAVIVNGSKSISLDPLDPLPAAAAADYKDHDGDYKDHDIDYKDDDDKGLDLAAAAALEPYKCPECGKSFSQSGDLRRHQRTHTGEKPYKCPECGKSFSRSDHLTTHQRTHTGEKPYKCPECGKSFSQSSSLVRHQRTHTGEKPYKCPECGKSFSTSGNLVRHQRTHTGEKPYKCPECGKSFSQRANLRAHQRTHTGEPYKCPECGKSFSRSDKLTEHQRTHTGLE

SEQ ID NO: 729 - protein, 1479 aa, Artificial Sequence; identical to SEQ ID NO: 681
  Synthetic Construct

SEQ ID NO: 730 - protein, 19 aa, Artificial Sequence
  Synthetic Construct
GSKSISLDPLDPLPAAAAA

SEQ ID NO: 731 - protein, 22 aa, Artificial Sequence
  Synthetic Construct
DYKDHDGDYKDHDIDYKDDDDK

SEQ ID NO: 732 - protein, 9 aa, Artificial Sequence
  Synthetic Construct
GLDLAAAAA

SEQ ID NO: 733 - protein, 169 aa, Artificial Sequence
  Synthetic Construct
LEPYKCPECGKSFSQSGDLRRHQRTHTGEKPYKCPECGKSFSRSDHLTTHQRTHTGEKPYKCPECGKSFSQSSSLVRHQRTHTGEKPYKCPECGKSFSTSGNLVRHQRTHTGEKPYKCPECGKSFSQRANLRAHQRTHTGEPYKCPECGKSFSRSDKLTEHQRTHTGLE

SEQ ID NO: 734 - DNA, 10003 bp, Artificial Sequence
  Synthetic Construct
cacaagcatgagtttttccttccggtaatcgtaaaatcaaaaatcgctcgctcgagaaacgccggtgctagaagaggaaagtaccgtacataatcctgcgaacccaattctcgtcttcttcaaactcagttttccgaaaccccaaacaccgcgaggattgcatggcctgaagaaccacttaatcgagaattgtgctggaattctcaaattttccctcgcgtttttctttcacactctcggaatcggaaatttccaccaagctccgtcaagcgatagattctgacaattacacactttcgcgcaggtatgcttccttccctgttttaggttggtgttaatctatcggtgaatcgaaggttttgggcctcgggctttgcgttttaggtttttcagagaatcttatctacttggggatggatcttaggcgtttgttagatgtaactcattagttttgcatataggaattttgatttgaaagttaggtcgccggatttgtagacattttgtttgatggtcttcttcggtgctcacattctttgtttttaagtgcttgatttggttgctaaggtcctttccgttgcgtgctctcagtgaatatgaagaaagatgaaaagattggtttgacggggagaaccatttacaccagatccctagcagcttcaattcctgcctcagttgaacaagaaacccctggtttgaggaggtcaagccgggggacaccatctacgaaggtaataactccagcttctgctactagaaagtcagagagactggctccctcacctgcttcagtttcaaaaaagtccggtggaatcgtcaagaattccacaccaagttctttgcgaaggtccaatagggggaagactgaagtatccttgcagagttccaaaggatcagataattctatcaggaaaggagatacttcaccggatattgagcagagaaaggatagtgttgaagagtcgacagataagatcaagcctataatgtcagcccgaagttacagggcattgtttagagggaagctcaaggaatctgaggcattagttgatgcttccccaaatgaagaggaactagtagttgttggttgttctcgccgcatacctgcaggcaatgatgatgttcaaggtaaaacagattgtccaccacctgcagatgcaggatcaaaaaggctgccagttgacgaaactagtttggacaagggcactgattttcctttgaaatcagttacggagaccgagaagatagtgcttgatgcatcccccatagttgaaactggggatgacagtgttataggttcaccatctgagaatttagagacacaaaagcttcaagatggtaagacagattgttcaccacctgcaaatgcagaatcgaaaacgctgccagttggtgaaactagtttagaaaaagaatatccacaaaagtttcaagatgataacacagattgtctaccacctgcaaatgcagaatcaaaaaggctgccagttggcgaaactagtttagaaaaggacactgattttcctttgaaatcaactacggagactggaaagatggttctttatgcatcccccatagttgaaactagggatgacagcgttatatgttcaccatctacaaatttagaaacccaaaagcttcttgtcagtaaaactggcttagaaaccgacatagttttgcctttgaaaagaaaaagagacactgcagaaattgagctggatgcatgtgctacagttgcaaatggagatgatcacgttatgagttctgatggggtcattccatctccatctgggtgcaaaaatgataatcgacctgaaatgtgcaacacgtgtaaaaaacggcaaaagtaagagtttttttagtgttgtctgtctattgaaacgatctgccaatgttgaatgttgggcagatgggtttgattcttaggatatatgttctgtattgtaatgagttgttcaaaattttgaagggtcaacggtgattgtcaaaataggagtgtttgctcctgcattgtccagccagttgaagaatctgataacgtgacacaggttggtttctaattactttcggagacccgttaatcagtggactcttaaatagttagatactagatttacttatccttttacttgtaatctgcaattctattttgcatttgattaggatatgaaagaaactggaccagttacgagcagagaatatgaggagaacgggcaaatacaacatggtaaatcaagtgatcccaaattctattcttcggtgtacccagagtattgggttcctgtgcagctatcagatgtacagctggagcaatactgtcagactctcttctccaaatccttatctctttcttcactttcgaagattgatcttggagctctagaagaaactctcaattctgtaagaaaagtaagttacttgattttaaaaacacttattcttcaatgcacttgtgagttaagtacccagttattactggtgataagataaagaaagcaatagaaaaattgataaggtgttcaccgcattgcagccaaaaaaacaattctgtgttccatgctttcaagaggttgtcacataggtgttatgcctttctgtttgatgtttggtagagcaaaggttttgggtctatttgttttatgcttttttgaaacacatagaacctggcaaacttgacagttttggggttgcttagatatacgactattgtcggtcagcatcacattttctcaaggcctctttctgcatgttaatgtgtgaatatattaaaatcttctttatgtgtttgcaacttgttgacagacctgtgaccatccatacgttatggatgcatctttgaaacaactgctcaccaagaatctggagttgcatgaaatcctggatgtagaaattaaagcgagcgggaaacttcacctccttgataaaatgcttactcatataaaaaagaatggtttaaaagcagttgtcttctaccaggtgcattttctattacttgcgaatgtgaatagctctatgtttgtcatgaatacgtcactttgtgcattctcaatatatgtgcattttctttttgacaatggaattctgtcttgtattgaaatttgagtgggatgaaagtatgctttttatcgtgcaattatgaagtgtaagttagccttcagcagtcagctagcattatgagatatgctgaactaaaatgtttcttttctcttctttctttttcgttatatgtgcctcatgtatgtttgaattacagtttttattttcagcaggcaacacaaacccctgaagggcttctgcttggtaatattctcgaagattttgtgggtcaaagatttggtccaaaatcttatgagcatgggatatattcctcaaagaagaactccgctataaacaatttcaacaaggagagtcaatgctgtgttctgctgttggaaacacgtgcctgcagtcaaaccattaaactcttgcgagctgatgcgtttattctttttggaagcagcttgaatccatcgcatgatgttaagcacgtagagaagataaaaatcgagtcatgttctgaaagaactaagatattccgattgtactcagtatgtacagttgaagaaaaagccctgattctggctaggcaaaataagcggcaaaataaagctgtagagaacctaaaccgctctctcacgcacgcactgctcatgtggggggcgtcatacttatttgataaactggatcattttcacagcagtgaaactccagattcaggagtttcatttgaacaatctattatggacggcgtgattcatgaattctcgtccatactttcttccaaaggtggagaagaaaatgaagtcaagctgtgtctacttttggaggccaagcatgctcagggaacttacagcagtgattctactctatttggtgaagaccatattaagttgtcagatgaagagagtccaaatatattttggtcaaagctgttggggggaaaaaatcctatgtggaaatacccttcagatactccccaaaggaatcgaaaacgagttcagtattttgagggttctgaagcgagtcccaaaactggcgatggtggaaatgcaaagaagcgaaagaaggcttctgatgatgtcactgatccccgggtcactgatccgccagtagatgatgatgaaagaaaggcctctgggaaggatcacatgggtaaaatagtttaatttctgctccgatacctctagtgttcattgattatgcaactactttgctgactatctttcctacaggggctttggagtcaccaaaagtcataacactccagtcatcatgtaaatcttctggtacagatggtacattggatggaaatgatgcttttggcttgtattctatgggcagccatatctctggaatcccagaggatatgttagctagtcaagattgggggaaaataccggatgaatcacagaggaggctccacactgttttaaagccgaagatggcaaaactttgccaagttttgcatctttcagtaagtggcctttttcacctccacaacttattttagccttgcatatgcttatatatagctgattgcaactgtagttgttacctgatttcctgttacagccaaatgtgagagttttattcttcaactatatccatccgtttaagcatattttatttcttatatctggcttcgttaccaatgcactgttaaaatgagcaactgctgcacaaaacagtaggtagttatgtgcctcatgtcattcattgtttattgaagcaaagaaatttctgtctactttacatgatccatctgtgggagtatataactatatataaccttaggcctttgtacctggctgatcaaagacatgtcaaaagtttatctgttcgctgttggtatagaaactaatacagtgtctgatgctattttaaggtagtcttatgtcttcacatattggctaatagatgtttccgctgtcgtgtccatatacttctgtgattatcacggtgctccgtctatcaaaattgtactaaaaggtattttgcaatgtgtgattggttaacagattattttgttttcaggatgcttgcacaagcatggtcggaaattttctcgaatatgttattgaaaatcaccgaatctacgaagagccagccactacttttcaggcattccagatagccctggtatgacagcatttactttgataatttatgcattgtttccttcatcatctgcctttgtttagaatgtcctcagaaggcagcactcctttagttttaactttccaatcataggattcaaatatccattaactggcctttgatcgctgcataatatatgaatagttgacatactgaatacgttgttaataatgcattttcagagttggattgcagccttgttggtaaagcaaattcttagccacaaagaatctctggtccgtgcaaattctgaattagctttcaaatgctctagagtagaggtggattatatttattcgatattgtcctgcatgaagagtctgttcctggagcatacacaaggtttgcagttcgattgctttggtactaattctaaacagtcagtggttagcacaaaactagtaaatgaaagtctctcaggggctacagtgcgtgacgaaaagattaatacgaagtcgatgcgaaatagctcagaggatgaagagtgcatgactgagaagagatgtagccattatagcacagcaacaagagatatcgaaaagactattagtggcataaaaaagaaatacaagaagcaagtgcaaaagcttgtacaagagcatgaggaaaagaaaatggagctgttaaatatgtatgcagacaagaagcagaaacttgaaactagtaaaagtgtggaagcagcagtaattcgtattacctgttcacggaccagtactcaagtgggtgatctcaaactgctggatcataattatgaaagaaagtttgatgaaatcaaaagtgagaaaaatgaatgcctcaaaagtctggagcaaatgcacgatgttgcaaagaagaagttggctgaggatgaagcctgttggattaatcggataaagagctgggcagctaaattaaaagtttgtgttcccattcaaagtggcaataacaagcattttagtggttcatcaaacatttcccaaaatgctcctgatgtacaaatttgcaataatgctaacgttgaagctacttacgctgatacgaattgcatggcttccaaggttaatcaagtgccagaagcagaaaacacattaggaaccatgtcgggtggcagcactcaacaagttcatgaaatggtggatgtaagaaatgacgagacaatggatgtctcagctttgtctcgtgaacagcttacaaagagccagtccaatgagcacgcttctatcactgtgcctgagattttgattcctgctgactgtcaagaggaatttgcggccttgaacgtgcatttgtcagaagaccagaattgtgacagaataacatctgcggcatcagatgaagatgtttcatcaagggtgccagaggtatcccagtcactcgaaaatctttctgcctcccccgagttttctctaaatagagaggaggctttggttacaacagaaaatagaagaacaagtcatgtgggttttgatactgataacattttggaccagcagaatagagaagattgttctcttgaccaagagattcctgacgagttagcgatgcctgtgcaacatcttgcgtctgtggtagagactaggggtgctgctgaatctgatcaggtacttactggccctgtagaatagttgatgccttgttcatttaatcttttctaatgttcattcttgctttcttgaaaataacgggtagtgatcagatgtctttttttctcttattaaattcacttttctggacagtatggtcaagatatatgtcctatgccttcttcactggctggaaagcaacctgacccagcagcaaacactgagagcgaaaatcttgaagaagcaattgagcctcagtctgctggttcagaaacagtagagactactgattttgctgcatcacatcaggtccctattgaagactttccttttttactagtttaaagttatcaatctgtgttatgttcattctaagtttccgtgagaaaaaggtggggaaatgtggttactgatcaagtctcgttgttgttttaaatcgactcttttgacagggtgatcaagttacatgtcctttgctatcttcaccgactggaaatcagcctgcgccagaagcaaatattgaaggccaaaatatcaacacatcagctgagccccatgtagcgggtccagatgcagtagagagtggtgattatgcagtaatagatcaggttattgccttaactaaagacaaatgtcttttgttgtttaaaagtcttacatctttgtaatgctcgttctggatatcctgcaggaaacaatgggtgctcaggatgcatgctctctgccatctggatcggttggaactcagtctgacctaggagcaaacattgagggtcaaaatgtcacaacagtggctcaacttcccacagatggatcagatgcagttgtaaccggtggatctcctgtatcagatcaggtacctgcctctgctcaaggactttcttatgtgttggtttaaaggtctagtccttagtaatgttgaaactaagcaaacagtggatagtgatcatatggttatttttgcttgtgaatttaatatttctggacagtgtgcccaggatgcatctcctatgccattatcttcgcctggaaatcaccctgatacagcagttaatatcgagggtttagataacacatcagtagctgagcctcatataagtggatcagatgcatgtgaaatggaaatttcagaacctggtccccaagtagagcggtcaacctttgcaagtcagtaactgccttgggcatttttaagtatcacctaggtcgacatatgtgattgccaaacagctaacaaggagatgccttttgtgcagatcttttccatgaaggtggcgtggagcattcagcaggtgtaacagctcttgttccatcacttcttaacaatggtacggaacagattgccgttcaacctgttcctcaaatacctttccctgtgttcaacgacccgtttctgcatgaactggagaagttgcggagagaatcagagaactcaaagaagacttttgaagaaaaagtcagtttccctcattacccagttacctcttgttttggtttattttctagctgcccattgactctcagttgcttgtgagcagaaatcaatcttgaaagctgaactcgagaggaagatggctgaagtacaagcagagtttcgaagaaaatttcatgaggtagaagccgagcataacaccagaacgacaaagatagagaaggataagaatcttgttataatgaacaaactgttggcgaatgcgttcttgtccaaatgtactgacaagaaggtatctccctcaggagctccaaggggtaagtgtcgaataatatagcaaattggttttaaaaataaggcgacgaagtcataatagcactttttctccaggtaaaattcagcagctagcacagagagcagcacaagtgagtgcactgagaaattacattgctcctcagcagcttcaggcatcttcttttcctgctcctgctctggtttcggctcctctgcaacttcagcaatcatcatttcctgctcctggtccggctcctctgcagcctcaggcatcttcgtttccttcttcagtctctcgtccatcagcccttcttctgaattttgcggtctgtccaatgcctcagcccagacagcctctcatatccaacatagctccaactccatcagttactcctgcaacaaatccaggtctgcgttctcctgcaccacacctaaactcatatagaccatcctcttcaactcccgtcgccacagctactccaacctcgtcagtgcctcctcaagctttgacatattcagctgtgtcaattcagcagcagcaagaacaacaaccgcaacagagcttgagcagtggattgcagagcaacaatgaagtggtttgtctttctgacgacgagggttcgaaatcgataagcttggatcctctagaccctttgcctgctgccgctgccgctgactacaaagaccatgacggtgattataaagatcatgatatcgattacaaggatgacgatgacaagggactagacttggctgccgctgccgctctcgagccttataaatgccctgagtgtggaaaatctttctctcaatctggagatcttaggaggcaccaaaggacccataccggtgaaaaaccttataaatgccctgagtgtggaaaatcattcagtaggagtgatcatcttaccacccatcagaggacccatactggtgaaaaaccttataaatgccctgagtgtggaaaatcattctcacaatcttcatctcttgttaggcatcagaggactcataccggagaaaaaccttataaatgccctgagtgtggaaaatcattctcaacatctggaaaccttgttaggcaccaaaggacccatactggtgaaaaaccttataaatgccctgagtgtggaaaatcattctctcagagagcaaaccttagggctcatcaaaggacacacactggagaaaaaccttataaatgccctgagtgtggaaaatctttctctaggagtgataagctcaccgagcatcaaaggactcacaccggactcgagtgacctaagaggagagatggttagggtcttagttattgatttttagagagttaataatagtatatatatatatgtataagtaggttacctaatctctgtcgttaatctaatttagtgagtcaggaaccgactcgttggctaaggtctctccttttgaaacgcaacgttctactttcatgtatataaatacagtctgatcacacaacacaaattgatgattgaaaatactactgatttaactt

SEQ ID NO: 735 - DNA, 596 bp, Artificial Sequence
  Synthetic Construct
cacaagcatgagtttttccttccggtaatcgtaaaatcaaaaatcgctcgctcgagaaacgccggtgctagaagaggaaagtaccgtacataatcctgcgaacccaattctcgtcttcttcaaactcagttttccgaaaccccaaacaccgcgaggattgcatggcctgaagaaccacttaatcgagaattgtgctggaattctcaaattttccctcgcgtttttctttcacactctcggaatcggaaatttccaccaagctccgtcaagcgatagattctgacaattacacactttcgcgcaggtatgcttccttccctgttttaggttggtgttaatctatcggtgaatcgaaggttttgggcctcgggctttgcgttttaggtttttcagagaatcttatctacttggggatggatcttaggcgtttgttagatgtaactcattagttttgcatataggaattttgatttgaaagttaggtcgccggatttgtagacattttgtttgatggtcttcttcggtgctcacattctttgtttttaagtgcttgatttggttgctaaggtcctttccgttgcgtgctctcagtgaat

SEQ ID NO: 736 - DNA, 8505 bp, Artificial Sequence
  Synthetic Construct
atgaagaaagatgaaaagattggtttgacggggagaaccatttacaccagatccctagcagcttcaattcctgcctcagttgaacaagaaacccctggtttgaggaggtcaagccgggggacaccatctacgaaggtaataactccagcttctgctactagaaagtcagagagactggctccctcacctgcttcagtttcaaaaaagtccggtggaatcgtcaagaattccacaccaagttctttgcgaaggtccaatagggggaagactgaagtatccttgcagagttccaaaggatcagataattctatcaggaaaggagatacttcaccggatattgagcagagaaaggatagtgttgaagagtcgacagataagatcaagcctataatgtcagcccgaagttacagggcattgtttagagggaagctcaaggaatctgaggcattagttgatgcttccccaaatgaagaggaactagtagttgttggttgttctcgccgcatacctgcaggcaatgatgatgttcaaggtaaaacagattgtccaccacctgcagatgcaggatcaaaaaggctgccagttgacgaaactagtttggacaagggcactgattttcctttgaaatcagttacggagaccgagaagatagtgcttgatgcatcccccatagttgaaactggggatgacagtgttataggttcaccatctgagaatttagagacacaaaagcttcaagatggtaagacagattgttcaccacctgcaaatgcagaatcgaaaacgctgccagttggtgaaactagtttagaaaaagaatatccacaaaagtttcaagatgataacacagattgtctaccacctgcaaatgcagaatcaaaaaggctgccagttggcgaaactagtttagaaaaggacactgattttcctttgaaatcaactacggagactggaaagatggttctttatgcatcccccatagttgaaactagggatgacagcgttatatgttcaccatctacaaatttagaaacccaaaagcttcttgtcagtaaaactggcttagaaaccgacatagttttgcctttgaaaagaaaaagagacactgcagaaattgagctggatgcatgtgctacagttgcaaatggagatgatcacgttatgagttctgatggggtcattccatctccatctgggtgcaaaaatgataatcgacctgaaatgtgcaacacgtgtaaaaaacggcaaaagtaagagtttttttagtgttgtctgtctattgaaacgatctgccaatgttgaatgttgggcagatgggtttgattcttaggatatatgttctgtattgtaatgagttgttcaaaattttgaagggtcaacggtgattgtcaaaataggagtgtttgctcctgcattgtccagccagttgaagaatctgataacgtgacacaggttggtttctaattactttcggagacccgttaatcagtggactcttaaatagttagatactagatttacttatccttttacttgtaatctgcaattctattttgcatttgattaggatatgaaagaaactggaccagttacgagcagagaatatgaggagaacgggcaaatacaacatggtaaatcaagtgatcccaaattctattcttcggtgtacccagagtattgggttcctgtgcagctatcagatgtacagctggagcaatactgtcagactctcttctccaaatccttatctctttcttcactttcgaagattgatcttggagctctagaagaaactctcaattctgtaagaaaagtaagttacttgattttaaaaacacttattcttcaatgcacttgtgagttaagtacccagttattactggtgataagataaagaaagcaatagaaaaattgataaggtgttcaccgcattgcagccaaaaaaacaattctgtgttccatgctttcaagaggttgtcacataggtgttatgcctttctgtttgatgtttggtagagcaaaggttttgggtctatttgttttatgcttttttgaaacacatagaacctggcaaacttgacagttttggggttgcttagatatacgactattgtcggtcagcatcacattttctcaaggcctctttctgcatgttaatgtgtgaatatattaaaatcttctttatgtgtttgcaacttgttgacagacctgtgaccatccatacgttatggatgcatctttgaaacaactgctcaccaagaatctggagttgcatgaaatcctggatgtagaaattaaagcgagcgggaaacttcacctccttgataaaatgcttactcatataaaaaagaatggtttaaaagcagttgtcttctaccaggtgcattttctattacttgcgaatgtgaatagctctatgtttgtcatgaatacgtcactttgtgcattctcaatatatgtgcattttctttttgacaatggaattctgtcttgtattgaaatttgagtgggatgaaagtatgctttttatcgtgcaattatgaagtgtaagttagccttcagcagtcagctagcattatgagatatgctgaactaaaatgtttcttttctcttctttctttttcgttatatgtgcctcatgtatgtttgaattacagtttttattttcagcaggcaacacaaacccctgaagggcttctgcttggtaatattctcgaagattttgtgggtcaaagatttggtccaaaatcttatgagcatgggatatattcctcaaagaagaactccgctataaacaatttcaacaaggagagtcaatgctgtgttctgctgttggaaacacgtgcctgcagtcaaaccattaaactcttgcgagctgatgcgtttattctttttggaagcagcttgaatccatcgcatgatgttaagcacgtagagaagataaaaatcgagtcatgttctgaaagaactaagatattccgattgtactcagtatgtacagttgaagaaaaagccctgattctggctaggcaaaataagcggcaaaataaagctgtagagaacctaaaccgctctctcacgcacgcactgctcatgtggggggcgtcatacttatttgataaactggatcattttcacagcagtgaaactccagattcaggagtttcatttgaacaatctattatggacggcgtgattcatgaattctcgtccatactttcttccaaaggtggagaagaaaatgaagtcaagctgtgtctacttttggaggccaagcatgctcagggaacttacagcagtgattctactctatttggtgaagaccatattaagttgtcagatgaagagagtccaaatatattttggtcaaagctgttggggggaaaaaatcctatgtggaaatacccttcagatactccccaaaggaatcgaaaacgagttcagtattttgagggttctgaagcgagtcccaaaactggcgatggtggaaatgcaaagaagcgaaagaaggcttctgatgatgtcactgatccccgggtcactgatccgccagtagatgatgatgaaagaaaggcctctgggaaggatcacatgggtaaaatagtttaatttctgctccgatacctctagtgttcattgattatgcaactactttgctgactatctttcctacaggggctttggagtcaccaaaagtcataacactccagtcatcatgtaaatcttctggtacagatggtacattggatggaaatgatgcttttggcttgtattctatgggcagccatatctctggaatcccagaggatatgttagctagtcaagattgggggaaaataccggatgaatcacagaggaggctccacactgttttaaagccgaagatggcaaaactttgccaagttttgcatctttcagtaagtggcctttttcacctccacaacttattttagccttgcatatgcttatatatagctgattgcaactgtagttgttacctgatttcctgttacagccaaatgtgagagttttattcttcaactatatccatccgtttaagcatattttatttcttatatctggcttcgttaccaatgcactgttaaaatgagcaactgctgcacaaaacagtaggtagttatgtgcctcatgtcattcattgtttattgaagcaaagaaatttctgtctactttacatgatccatctgtgggagtatataactatatataaccttaggcctttgtacctggctgatcaaagacatgtcaaaagtttatctgttcgctgttggtatagaaactaatacagtgtctgatgctattttaaggtagtcttatgtcttcacatattggctaatagatgtttccgctgtcgtgtccatatacttctgtgattatcacggtgctccgtctatcaaaattgtactaaaaggtattttgcaatgtgtgattggttaacagattattttgttttcaggatgcttgcacaagcatggtcggaaattttctcgaatatgttattgaaaatcaccgaatctacgaagagccagccactacttttcaggcattccagatagccctggtatgacagcatttactttgataatttatgcattgtttccttcatcatctgcctttgtttagaatgtcctcagaaggcagcactcctttagttttaactttccaatcataggattcaaatatccattaactggcctttgatcgctgcataatatatgaatagttgacatactgaatacgttgttaataatgcattttcagagttggattgcagccttgttggtaaagcaaattcttagccacaaagaatctctggtccgtgcaaattctgaattagctttcaaatgctctagagtagaggtggattatatttattcgatattgtcctgcatgaagagtctgttcctggagcatacacaaggtttgcagttcgattgctttggtactaattctaaacagtcagtggttagcacaaaactagtaaatgaaagtctctcaggggctacagtgcgtgacgaaaagattaatacgaagtcgatgcgaaatagctcagaggatgaagagtgcatgactgagaagagatgtagccattatagcacagcaacaagagatatcgaaaagactattagtggcataaaaaagaaatacaagaagcaagtgcaaaagcttgtacaagagcatgaggaaaagaaaatggagctgttaaatatgtatgcagacaagaagcagaaacttgaaactagtaaaagtgtggaagcagcagtaattcgtattacctgttcacggaccagtactcaagtgggtgatctcaaactgctggatcataattatgaaagaaagtttgatgaaatcaaaagtgagaaaaatgaatgcctcaaaagtctggagcaaatgcacgatgttgcaaagaagaagttggctgaggatgaagcctgttggattaatcggataaagagctgggcagctaaattaaaagtttgtgttcccattcaaagtggcaataacaagcattttagtggttcatcaaacatttcccaaaatgctcctgatgtacaaatttgcaataatgctaacgttgaagctacttacgctgatacgaattgcatggcttccaaggttaatcaagtgccagaagcagaaaacacattaggaaccatgtcgggtggcagcactcaacaagttcatgaaatggtggatgtaagaaatgacgagacaatggatgtctcagctttgtctcgtgaacagcttacaaagagccagtccaatgagcacgcttctatcactgtgcctgagattttgattcctgctgactgtcaagaggaatttgcggccttgaacgtgcatttgtcagaagaccagaattgtgacagaataacatctgcggcatcagatgaagatgtttcatcaagggtgccagaggtatcccagtcactcgaaaatctttctgcctcccccgagttttctctaaatagagaggaggctttggttacaacagaaaatagaagaacaagtcatgtgggttttgatactgataacattttggaccagcagaatagagaagattgttctcttgaccaagagattcctgacgagttagcgatgcctgtgcaacatcttgcgtctgtggtagagactaggggtgctgctgaatctgatcaggtacttactggccctgtagaatagttgatgccttgttcatttaatcttttctaatgttcattcttgctttcttgaaaataacgggtagtgatcagatgtctttttttctcttattaaattcacttttctggacagtatggtcaagatatatgtcctatgccttcttcactggctggaaagcaacctgacccagcagcaaacactgagagcgaaaatcttgaagaagcaattgagcctcagtctgctggttcagaaacagtagagactactgattttgctgcatcacatcaggtccctattgaagactttccttttttactagtttaaagttatcaatctgtgttatgttcattctaagtttccgtgagaaaaaggtggggaaatgtggttactgatcaagtctcgttgttgttttaaatcgactcttttgacagggtgatcaagttacatgtcctttgctatcttcaccgactggaaatcagcctgcgccagaagcaaatattgaaggccaaaatatcaacacatcagctgagccccatgtagcgggtccagatgcagtagagagtggtgattatgcagtaatagatcaggttattgccttaactaaagacaaatgtcttttgttgtttaaaagtcttacatctttgtaatgctcgttctggatatcctgcaggaaacaatgggtgctcaggatgcatgctctctgccatctggatcggttggaactcagtctgacctaggagcaaacattgagggtcaaaatgtcacaacagtggctcaacttcccacagatggatcagatgcagttgtaaccggtggatctcctgtatcagatcaggtacctgcctctgctcaaggactttcttatgtgttggtttaaaggtctagtccttagtaatgttgaaactaagcaaacagtggatagtgatcatatggttatttttgcttgtgaatttaatatttctggacagtgtgcccaggatgcatctcctatgccattatcttcgcctggaaatcaccctgatacagcagttaatatcgagggtttagataacacatcagtagctgagcctcatataagtggatcagatgcatgtgaaatggaaatttcagaacctggtccccaagtagagcggtcaacctttgcaagtcagtaactgccttgggcatttttaagtatcacctaggtcgacatatgtgattgccaaacagctaacaaggagatgccttttgtgcagatcttttccatgaaggtggcgtggagcattcagcaggtgtaacagctcttgttccatcacttcttaacaatggtacggaacagattgccgttcaacctgttcctcaaatacctttccctgtgttcaacgacccgtttctgcatgaactggagaagttgcggagagaatcagagaactcaaagaagacttttgaagaaaaagtcagtttccctcattacccagttacctcttgttttggtttattttctagctgcccattgactctcagttgcttgtgagcagaaatcaatcttgaaagctgaactcgagaggaagatggctgaagtacaagcagagtttcgaagaaaatttcatgaggtagaagccgagcataacaccagaacgacaaagatagagaaggataagaatcttgttataatgaacaaactgttggcgaatgcgttcttgtccaaatgtactgacaagaaggtatctccctcaggagctccaaggggtaagtgtcgaataatatagcaaattggttttaaaaataaggcgacgaagtcataatagcactttttctccaggtaaaattcagcagctagcacagagagcagcacaagtgagtgcactgagaaattacattgctcctcagcagcttcaggcatcttcttttcctgctcctgctctggtttcggctcctctgcaacttcagcaatcatcatttcctgctcctggtccggctcctctgcagcctcaggcatcttcgtttccttcttcagtctctcgtccatcagcccttcttctgaattttgcggtctgtccaatgcctcagcccagacagcctctcatatccaacatagctccaactccatcagttactcctgcaacaaatccaggtctgcgttctcctgcaccacacctaaactcatatagaccatcctcttcaactcccgtcgccacagctactccaacctcgtcagtgcctcctcaagctttgacatattcagctgtgtcaattcagcagcagcaagaacaacaaccgcaacagagcttgagcagtggattgcagagcaacaatgaagtggtttgtctttctgacgacgag

SEQ ID NO: 737 - DNA, 57 bp, Artificial Sequence; identical to SEQ ID NO: 723
  Synthetic Construct

SEQ ID NO: 738 - DNA, 66 bp, Artificial Sequence; identical to SEQ ID NO: 724
  Synthetic Construct

SEQ ID NO: 739 - DNA, 27 bp, Artificial Sequence
  Synthetic Construct
ggactagacttggctgccgctgccgct

SEQ ID NO: 740 - DNA, 513 bp, Artificial Sequence; identical to SEQ ID NO: 726
  Synthetic Construct

SEQ ID NO: 741 - DNA, 239 bp, Artificial Sequence
  Synthetic Construct
cctaagaggagagatggttagggtcttagttattgatttttagagagttaataatagtatatatatatatgtataagtaggttacctaatctctgtcgttaatctaatttagtgagtcaggaaccgactcgttggctaaggtctctccttttgaaacgcaacgttctactttcatgtatataaatacagtctgatcacacaacacaaattgatgattgaaaatactactgatttaactt

SEQ ID NO: 742 - protein, 2220 aa, Artificial Sequence
  Synthetic Construct
MKKDEKIGLTGRTIYTRSLAASIPASVEQETPGLRRSSRGTPSTKVITPASATRKSERLAPSPASVSKKSGGIVKNSTPSSLRRSNRGKTEVSLQSSKGSDNSIRKGDTSPDIEQRKDSVEESTDKIKPIMSARSYRALFRGKLKESEALVDASPNEEELVVVGCSRRIPAGNDDVQGKTDCPPPADAGSKRLPVDETSLDKGTDFPLKSVTETEKIVLDASPIVETGDDSVIGSPSENLETQKLQDGKTDCSPPANAESKTLPVGETSLEKEYPQKFQDDNTDCLPPANAESKRLPVGETSLEKDTDFPLKSTTETGKMVLYASPIVETRDDSVICSPSTNLETQKLLVSKTGLETDIVLPLKRKRDTAEIELDACATVANGDDHVMSSDGVIPSPSGCKNDNRPEMCNTCKKRQKVNGDCQNRSVCSCIVQPVEESDNVTQDMKETGPVTSREYEENGQIQHGKSSDPKFYSSVYPEYWVPVQLSDVQLEQYCQTLFSKSLSLSSLSKIDLGALEETLNSVRKTCDHPYVMDASLKQLLTKNLELHEILDVEIKASGKLHLLDKMLTHIKKNGLKAVVFYQATQTPEGLLLGNILEDFVGQRFGPKSYEHGIYSSKKNSAINNFNKESQCCVLLLETRACSQTIKLLRADAFILFGSSLNPSHDVKHVEKIKIESCSERTKIFRLYSVCTVEEKALILARQNKRQNKAVENLNRSLTHALLMWGASYLFDKLDHFHSSETPDSGVSFEQSIMDGVIHEFSSILSSKGGEENEVKLCLLLEAKHAQGTYSSDSTLFGEDHIKLSDEESPNIFWSKLLGGKNPMWKYPSDTPQRNRKRVQYFEGSEASPKTGDGGNAKKRKKASDDVTDPRVTDPPVDDDERKASGKDHMGALESPKVITLQSSCKSSGTDGTLDGNDAFGLYSMGSHISGIPEDMLASQDWGKIPDESQRRLHTVLKPKMAKLCQVLHLSDACTSMVGNFLEYVIENHRIYEEPATTFQAFQIALSWIAALLVKQILSHKESLVRANSELAFKCSRVEVDYIYSILSCMKSLFLEHTQGLQFDCFGTNSKQSVVSTKLVNESLSGATVRDEKINTKSMRNSSEDEECMTEKRCSHYSTATRDIEKTISGIKKKYKKQVQKLVQEHEEKKMELLNMYADKKQKLETSKSVEAAVIRITCSRTSTQVGDLKLLDHNYERKFDEIKSEKNECLKSLEQMHDVAKKKLAEDEACWINRIKSWAAKLKVCVPIQSGNNKHFSGSSNISQNAPDVQICNNANVEATYADTNCMASKVNQVPEAENTLGTMSGGSTQQVHEMVDVRNDETMDVSALSREQLTKSQSNEHASITVPEILIPADCQEEFAALNVHLSEDQNCDRITSAASDEDVSSRVPEVSQSLENLSASPEFSLNREEALVTTENRRTSHVGFDTDNILDQQNREDCSLDQEIPDELAMPVQHLASVVETRGAAESDQYGQDICPMPSSLAGKQPDPAANTESENLEEAIEPQSAGSETVETTDFAASHQGDQVTCPLLSSPTGNQPAPEANIEGQNINTSAEPHVAGPDAVESGDYAVIDQETMGAQDACSLPSGSVGTQSDLGANIEGQNVTTVAQLPTDGSDAVVTGGSPVSDQCAQDASPMPLSSPGNHPDTAVNIEGLDNTSVAEPHISGSDACEMEISEPGPQVERSTFANLFHEGGVEHSAGVTALVPSLLNNGTEQIAVQPVPQIPFPVFNDPFLHELEKLRRESENSKKTFEEKKSILKAELERKMAEVQAEFRRKFHEVEAEHNTRTTKIEKDKNLVIMNKLLANAFLSKCTDKKVSPSGAPRGKIQQLAQRAAQVSALRNYIAPQQLQASSFPAPALVSAPLQLQQSSFPAPGPAPLQPQASSFPSSVSRPSALLLNFAVCPMPQPRQPLISNIAPTPSVTPATNPGLRSPAPHLNSYRPSSSTPVATATPTSSVPPQALTYSAVSIQQQQEQQPQQSLSSGLQSNNEVVCLSDDEGSKSISLDPLDPLPAAAAADYKDHDGDYKDHDIDYKDDDDKGLDLAAAAALEPYKCPECGKSFSQSGDLRRHQRTHTGEKPYKCPECGKSFSRSDHLTTHQRTHTGEKPYKCPECGKSFSQSSSLVRHQRTHTGEKPYKCPECGKSFSTSGNLVRHQRTHTGEKPYKCPECGKSFSQRANLRAHQRTHTGEPYKCPECGKSFSRSDKLTEHQRTHTGLE

SEQ ID NO: 743 - protein, 2001 aa, Artificial Sequence; identical to SEQ ID NO: 694
  Synthetic Construct

SEQ ID NO: 744 - protein, 19 aa, Artificial Sequence
  Synthetic Construct
GSKSISLDPLDPLPAAAAA

SEQ ID NO: 745 - protein, 22 aa, Artificial Sequence
  Synthetic Construct
DYKDHDGDYKDHDIDYKDDDDK

SEQ ID NO: 746 - protein, 9 aa, Artificial Sequence
  Synthetic Construct
GLDLAAAAA

SEQ ID NO: 747 - protein, 169 aa, Artificial Sequence; identical to SEQ ID NO: 733
  Synthetic Construct

SEQ ID NO: 748 - protein, 395 aa, Mycoplasma penetrans
MNSNKDKIKVIKVFEAFAGIGSQFKALKNIARSKNWEIQHSGMVEWFVDAIVSYVAIHSKNFNPKIEQLDKDILSISNDSKMPISEYGIKKINNTIKASYLNYAKKHFNNLFDIKKVNKDNFPKNIDIFTYSFPCQDLSVQGLQKGIDKELNTRSGLLWEIERILEEIKNSFSKEEMPKYLLMENVKNLLSHKNKKNYNTWLKQLEKFGYKSKTYLLNSKNFDNCQNRERVFCLSIRDDYLEKTGFKFKELEKVKNPPKKIKDILVDSSNYKYLNLNKYETTTFRETKSNIISRSLKNYTTFNSENYVYNINGIGPTLTASGANSRIKIETQQGVRYLTPLECFKYMQFDVNDFKKVQSTNLISENKMIYIAGNSIPVKILEAIFNTLEFVNNEE

SEQ ID NO: 749 - protein, 372 aa, Acholeplasma sp. CAG:878
MKKIRVFETFSGIGAQNKALKNSGLDYEVVATSDWFIDAILAYDAIHCKDEKISVPSYEKQIEYLSKFTFSGDSVKPYHNLMKKSKKEIKKLYIANKRTKNLGSITEITSKVIPDHDLLTYSFPCQDLSTGGKTRGMSKGSGTRSGLLWEIERILGELNNEGRLPKYLLMENVKAILAPSNKRDFEMWKKFLEDLGYKNEVMVLSGIYFGVPQDRARCFMVSILGNKKPKIEKRLKKNSYPASDIKKFLKTDYTNKTYKKEADEAQLPRTRSRELMWNINKRDVENLTYFNTITCNMDRQNNAGMILYDGPKGNSYRLLTAREAFLLMGFSEEDFENVKKLGLSYRKMIKLAGNSIVVPVLEAIFKVMFEEK

SEQ ID NO: 750 - protein, 248 aa, Mycoplasma hyosynoviae
SQQGLQKGITKTTRSGLLYEIERILLLNKDRLPKILLLENVKALTSKKFINDLNSWIETLNKLGYTSYYKVLNSQDYGSSQNRERIFMISIFNANGKKFNFENKTTHFKKLEDILDENYSKKLVLLNLNKYEKSDFITTKNSITKARLLNYSNFNSETYIYLPKGIGPTLTASGANSRLKFYYESNKEIRLISYYEAYEYMGFSKKYAHIIKEQDIISEEKMIFTCGNSISVEVLEKIFEELIENGFF

SEQ ID NO: 751 - protein, 454 aa, Mesoplasma seiffertii
MSKSKIRVFETFAGIGAQHKALEILKKQDFLDYEVVATSEWDIWANISYNAIHHNNKNIAKPLKDKELNDFFDKFDLSNDSKKVADKMFVKRLPRTTKEILYSSMVNSNNLGSILNITGESLINSITKESTKNSYQTGVDLITYSFPCQDLSTAGNFHNSNKGMKKGSGTRSGLLWEIERILRELKVLNQLPKYLLLENVRNMLSNKHIDDYREWLSFLHDELGYNTQTYQLNAKDYDSPQARTRVYALSVLGEDDQNFHDSFAKNNRVIEVETIPKNVSSQLKIKKKLHQVLKTDYTKQEYLEEASKATPNLTPSRVKMYCENPILHLSNISEAKYQSQYQKIGSNGYYMNYSRTVTTKQDRNPNSGMISIENSLLIKEHENNPLKKNMHYRLLTPRETYLLMGFEEKDVKKIFENDFISQAVRYRQAGNSIVVNVLVAIFKKVAELEYKEEE

SEQ ID NO: 752 - protein, 416 aa, Clostridium diolis
MVFRVIEAFSGIGSQAKALKNIGIEFEILATVDWDINAIIAYDIIHNGVPDLDKYKLKTKEELIKVLSKYTLSSDGKKPLDETAIKRMNRNVMEHLVAAIDRSKNLVSITDVRGENLPNDIDLFTYSFPCQDLSIAGAWHGNNSGIDRDANNRSGMLWEVERILMERNDLGLTMPKFLLMENVSNILCNTHKSNFEEWQNNLEYMGYYNKIYKLNASDFGIPQKRERVYMVSVLCEGNIKKAVKEYIDNNDLSIPMYINNINVERVGLEDILRVDYSNEVYKKEADESQPNDTESRRKIYQENDLLYDGNQVLRDVVTTITTKQDRNPNSGVIEYSAQNENKSNYRYLTPRECFMLMGFDEHDFQALIDNNFPVTKSMDFFVASKLYKMAGNSIVVNVLEAIFRQIEDIKNNILNN

SEQ ID NO: 753 - protein, 408 aa, Streptococcus sanguinis
MIETFSGIGSQTQALKNLRIDHKVVAIAEWDISAMYAYDILHNGEQDIKSLRHHTKESLISVLSRYNLSSNGKNPITLKALKSMSIAQLKAIYLSIERNNNLVDISEVHSQDLPDADILTYSFPCQDLSVSGYWHNNTSGIDRDAENRSTLLWQIERILKEYVASQKKLPRFLLMENVSNILSQRHIDNFNEWKTFLESLGYINKVYTLDARNFGVPQARKRTFMLSVLAENDIEIRRIDEYLNANDLQTFKTTQLKNISDFLRLDYSVEKYKKEAIESTPRFTESRKKIFRDNIVLATGTKINASAAKTVTTKQDRNPNSGIIKYAKNDYLVEWNTHYRNLTPRECFMLMGFKEEQFDLLLLNNFENKKGSYFLTASKLIKMAGNSIVVPILEEIFKQMEEIKKVLD

SEQ ID NO: 754 - protein, 403 aa, Mycoplasma penetrans HF-2
MDSNKDKIKVIKVFEAFAGIGSQFKALKNIARSKNWEIQHSGMVEWFVDAIVSYVAIHSKNFNPKIERLDRDILSISNDSKMPISEYGIKKINNTIKASYLNYAKKHFNNLFDIKKVNKDNFPKNIDIFTYSFPCQDLSVQGLQKGIDKELNTRSGLLWEIERILEEIKNSFSKEEMPKYLLMENVKNLLSHKNKKNYNTWLKQLEKFGYKSKTYLLNSKNFDNCQNRERVFCLSIRDDYLEKTGFKFKELEKVKNPPKKIKDILVDSSNYKYLNLNKYETTTFRETKSNIISRPLKNYTTFNSENYVYNINGIGPTLTASGANSRIKIETQQGVRYLTPLECFKYMQFDVNDFKKVQSTNLISENKMIYIAGNSIPVKILEAIFNTLEFVNNEELEHHHHHH

SEQ ID NO: 755 - protein, 327 aa, Haemophilus parahaemolyticus
MIEIKDKQLTGLRFIDLFAGLGGFRLALESCGAECVYSNEWDKYAQEVYEMNFGEKPEGDITQVNEKTIPDHDILCAGFPCQAFSISGKQKGFEDSRGTLFFDIARIVREKKPKVVFMENVKNFASHDNGNTLEVVKNTMNELDYSFHAKVLNALDYGIPQKRERIYMICFRNDLNIQNFQFPKPFELNTFVKDLLLPDSEVEHLVIDRKDLVMTNQEIEQTTPKTVRLGIVGKGGQGERIYSTRGIAITLSAYGGGIFAKTGGYLVNGKTRKLHPRECARVMGYPDSYKVHPSTSQAYKQFGNSVVINVLQYIAYNIGSSLNFKPY

SEQ ID NO: 756 - DNA, 4782 bp, Artificial Sequence; identical to SEQ ID NO: 663
  Synthetic Construct

SEQ ID NO: 757 - DNA, 1992 bp, Artificial Sequence; identical to SEQ ID NO: 658
  Synthetic Construct

SEQ ID NO: 758 - DNA, 630 bp, Artificial Sequence; identical to SEQ ID NO: 659
  Synthetic Construct

SEQ ID NO: 759 - DNA, 97 bp, Artificial Sequence; identical to SEQ ID NO: 660
  Synthetic Construct

SEQ ID NO: 760 - DNA, 1161 bp, Artificial Sequence; identical to SEQ ID NO: 661
  Synthetic Construct

SEQ ID NO: 761 - DNA, 739 bp, Artificial Sequence; identical to SEQ ID NO: 662
  Synthetic Construct

SEQ ID NO: 762 - protein, 649 aa, Artificial Sequence
  Synthetic Construct
MVGYQQMAGGLNDIFEAQKIEWHEDTGGSSIPGLEVLFQGPLEPYKCPECGKSFSQSGDLRRHQRTHTGEKPYKCPECGKSFSRSDHLTTHQRTHTGEKPYKCPECGKSFSQSSSLVRHQRTHTGEKPYKCPECGKSFSTSGNLVRHQRTHTGEKPYKCPECGKSFSQRANLRAHQRTHTGEKPYKCPECGKSFSRSDKLTEHQRTHTGLEDYKDDDDKDYKDDDDKDYKDDDDKKLDIAMGGAPSYQTSLYKKAGSAAAPFTMSKVENKTKKLRVFEAFAGIGAQRKALEKVRKDEYEIVGLAEWYVPAIVMYQAIHNNFHTKLEYKSVSREEMIDYLENKTLSWNSKNPVSNGYWKRKKDDELKIIYNAIKLSEKEGNIFDIRDLYKRTLKNIDLLTYSFPCQDLSQQGIQKGMKRGSGTRSGLLWEIERALDSTEKNDLPKYLLMENVGALLHKKNEEELNQWKQKLESLGYQNSIEVLNAADFGSSQARRRVFMISTLNEFVELPKGDKKPKSIKKVLNKIVSEKDILNNLLKYNLTEFKKTKSNINKASLIGYSKFNSEGYVYDPEFTGPTLTASGANSRIKIKDGSNIRKMNSDETFLYIGFDSQDGKRVNEIEFLTENQKIFVCGNSISVEVLEAIIDKIGG

SEQ ID NO: 763 - protein, 169 aa, Artificial Sequence
  Synthetic Construct
LEPYKCPECGKSFSQSGDLRRHQRTHTGEKPYKCPECGKSFSRSDHLTTHQRTHTGEKPYKCPECGKSFSQSSSLVRHQRTHTGEKPYKCPECGKSFSTSGNLVRHQRTHTGEKPYKCPECGKSFSQRANLRAHQRTHTGEKPYKCPECGKSFSRSDKLTEHQRTHTGL

SEQ ID NO: 764 - protein, 27 aa, Artificial Sequence
  Synthetic Construct
DYKDDDDKDYKDDDDKDYKDDDDKKLD

SEQ ID NO: 765 - protein, 386 aa, Artificial Sequence; identical to SEQ ID NO: 680
  Synthetic Construct

SEQ ID NO: 766 - DNA, 2018 bp, Artificial Sequence; identical to SEQ ID NO: 434
  Synthetic Construct

SEQ ID NO: 767 - DNA, 7099 bp, Artificial Sequence
  Synthetic Construct
atgcatatgagtctagctcaacagagcttttaacccaaattggtacaatagaatacaactttagatcataattctcaaaagaaagagattccttagctattctatctgccactccatttccttctcggcttgtatgcacaagcataaaatcctcaaacttgctaagtagatactttatgtcttggataattggattgagacttgacaagcataactttcatgtaaccaaagacacaagttgctgagaatccacctcaaaaatgatcttcctataattgaatcgggataatgacagcacagcccatctaagagcctccacttctacttccagcacgcttcttacttttaccacagctcttgcacctaaccataacaccttccctgtatgatcgcgaagcacccaccctaagccacattttaatccttctgttggccatgccccatcaaagttgcacttaacccaagattgtggtggagcttcccatgtttctcgtctgtcccgacggtgttgtggttggtgctttccttacattctgagcctctttccttctaatccactcatctgcatcttcttgtgtccttactaatacctcattggttccaaattccctccctttaagcaccagctcgtttctgttcttccacagcctcccaagtatccaagggactaaagcctccacattcttcagatcaggatattcttgtttaagatgttgaactctatggaggtttgtatgaactgatgatctaggaccggataagttcccttcttcatagcgaacttattcaaagaatgttttgtgtatcattcttgttacattgttattaatgaaaaaatattattggtcattggactgaacacgagtgttaaatatggaccaggccccaaataagatccattgatatatgaattaaataacaagaataaatcgagtcaccaaaccacttgccttttttaacgagacttgttcaccaacttgatacaaaagtcattatcctatgcaaatcaataatcatacaaaaatatccaataacactaaaaaattaaaagaaatggataatttcacaatatgttatacgataaagaagttacttttccaagaaattcactgattttataagcccacttgcattagataaatggcaaaaaaaaacaaaaaggaaaagaaataaagcacgaagaattctagaaaatacgaaatacgcttcaatgcagtgggacccacggttcaattattgccaattttcagctccaccgtatatttaaaaaataaaacgataatgctaaaaaaatataaatcgtaacgatcgttaaatctcaacggctggatcttatgacgaccgttagaaattgtggttgtcgacgagtcagtaataaacggcgtcaaagtggttgcagccggcacacacgagtcgtgtttatcaactcaaagcacaaatacttttcctcaacctaaaaataaggcaattagccaaaaacaactttgcgtgtaaacaacgctcaatacacgtgtcattttattattagctattgcttcaccgccttagctttctcgtgacctagtcgtcctcgtcttttcttcttcttcttctataaaacaatacccaaagagctcttcttcttcacaattcagatttcaatttctcaaaatcttaaaaactttctctcaattctctctaccgtgatcaaggtaaatttctgtgttccttattctctcaaaatcttcgattttgttttcgttcgatcccaatttcgtatatgttctttggtttagattctgttaatcttagatcgaagacgattttctgggtttgatcgttagatatcatcttaattctcgattagggtttcatagatatcatccgatttgttcaaataatttgagttttgtcgaataattactcttcgatttgtgatttctatctagatctggtgttagtttctagtttgtgcgatcgaatttgtcgattaatctgagtttttctgattaacagggatcatcaacaagtttgtacaaaaaagcaggctctttaaagtatttttacaacaattaccaacaacaacaaacaacaaacaacattacaattactatttacaattacaaaaaaagttaacatggacaagaagtacagcatcggcctggccatcggcaccaactctgtgggctgggccgtgatcaccgacgagtacaaggtgcccagcaagaaattcaaggtgctgggcaacaccgaccggcacagcatcaagaagaacctgatcggcgccctgctgttcgacagcggagaaacagccgaggccacccggctgaagagaaccgccagaagaagatacaccagacggaagaaccggatctgctatctgcaagagatcttcagcaacgagatggccaaggtggacgacagcttcttccacagactggaagagtccttcctggtggaagaggataagaagcacgagcggcaccccatcttcggcaacatcgtggacgaggtggcctaccacgagaagtaccccaccatctaccacctgagaaagaaactggtggacagcaccgacaaggccgacctgcggctgatctatctggccctggcccacatgatcaagttccggggccacttcctgatcgagggcgacctgaaccccgacaacagcgacgtggacaagctgttcatccagctggtgcagacctacaaccagctgttcgaggaaaaccccatcaacgccagcggcgtggacgccaaggccatcctgtctgccagactgagcaagagcagacggctggaaaatctgatcgcccagctgcccggcgagaagaagaatggcctgttcggcaacctgattgccctgagcctgggcctgacccccaacttcaagagcaacttcgacctggccgaggatgccaaactgcagctgagcaaggacacctacgacgacgacctggacaacctgctggcccagatcggcgaccagtacgccgacctgtttctggccgccaagaacctgtccgacgccatcctgctgagcgacatcctgagagtgaacaccgagatcaccaaggcccccctgagcgcctctatgatcaagagatacgacgagcaccaccaggacctgaccctgctgaaagctctcgtgcggcagcagctgcctgagaagtacaaagagattttcttcgaccagagcaagaacggctacgccggctacatcgatggcggagccagccaggaagagttctacaagttcatcaagcccatcctggaaaagatggacggcaccgaggaactgctcgtgaagctgaacagagaggacctgctgcggaagcagcggaccttcgacaacggcagcatcccccaccagatccacctgggagagctgcacgccattctgcggcggcaggaagatttttacccattcctgaaggacaaccgggaaaagatcgagaagatcctgaccttccgcatcccctactacgtgggccctctggccaggggaaacagcagattcgcctggatgaccagaaagagcgaggaaaccatcaccccctggaacttcgaggaagtggtggacaagggcgccagcgcccagagcttcatcgagcggatgaccaacttcgataagaacctgcccaacgagaaggtgctgcccaagcacagcctgctgtacgagtacttcaccgtgtacaacgagctgaccaaagtgaaatacgtgaccgagggaatgagaaagcccgccttcctgagcggcgagcagaaaaaagccatcgtggacctgctgttcaagaccaaccggaaagtgaccgtgaagcagctgaaagaggactacttcaagaaaatcgagtgcttcgactccgtggaaatctccggcgtggaagatcggttcaacgcctccctgggcacataccacgatctgctgaaaattatcaaggacaaggacttcctggacaatgaggaaaacgaggacattctggaagatatcgtgctgaccctgacactgtttgaggacagagagatgatcgaggaacggctgaaaacctatgcccacctgttcgacgacaaagtgatgaagcagctgaagcggcggagatacaccggctggggcaggctgagccggaagctgatcaacggcatccgggacaagcagtccggcaagacaatcctggatttcctgaagtccgacggcttcgccaacagaaacttcatgcagctgatccacgacgacagcctgacctttaaagaggacatccagaaagcccaggtgtccggccagggcgatagcctgcacgagcacattgccaatctggccggcagccccgccattaagaagggcatcctgcagacagtgaaggtggtggacgagctcgtgaaagtgatgggccggcacaagcccgagaacatcgtgatcgaaatggccagagagaaccagaccacccagaagggacagaagaacagccgcgagagaatgaagcggatcgaagagggcatcaaagagctgggcagccagatcctgaaagaacaccccgtggaaaacacccagctgcagaacgagaagctgtacctgtactacctgcagaatgggcgggatatgtacgtggaccaggaactggacatcaaccggctgtccgactacgatgtggacgctatcgtgcctcagagctttctgaaggacgactccatcgataacaaagtgctgactcggagcgacaagaaccggggcaagagcgacaacgtgccctccgaagaggtcgtgaagaagatgaagaactactggcgccagctgctgaatgccaagctgattacccagaggaagttcgacaatctgaccaaggccgagagaggcggcctgagcgaactggataaggccggcttcatcaagagacagctggtggaaacccggcagatcacaaagcacgtggcacagatcctggactcccggatgaacactaagtacgacgagaacgacaaactgatccgggaagtgaaagtgatcaccctgaagtccaagctggtgtccgatttccggaaggatttccagttttacaaagtgcgcgagatcaacaactaccaccacgcccacgacgcctacctgaacgccgtcgtgggaaccgccctgatcaaaaagtaccctaagctggaaagcgagttcgtgtacggcgactacaaggtgtacgacgtgcggaagatgatcgccaagagcgagcaggaaatcggcaaggctaccgccaagtacttcttctacagcaacatcatgaactttttcaagaccgagattaccctggccaacggcgagatccggaagcggcctctgatcgagacaaacggcgaaacaggcgagatcgtgtgggataagggccgggactttgccaccgtgcggaaagtgctgtctatgccccaagtgaatatcgtgaaaaagaccgaggtgcagacaggcggcttcagcaaagagtctatcctgcccaagaggaacagcgacaagctgatcgccagaaagaaggactgggaccctaagaagtacggcggcttcgacagccccaccgtggcctattctgtgctggtggtggccaaagtggaaaagggcaagtccaagaaactgaagagtgtgaaagagctgctggggatcaccatcatggaaagaagcagcttcgagaagaatcccatcgactttctggaagccaagggctacaaagaagtgaaaaaggacctgatcatcaagctgcctaagtactccctgttcgagctggaaaacggccggaagagaatgctggcctctgccggcgaactgcagaagggaaacgaactggccctgccctccaaatatgtgaacttcctgtacctggccagccactatgagaagctgaagggctcccccgaggataatgagcagaaacagctgtttgtggaacagcacaaacactacctggacgagatcatcgagcagatcagcgagttctccaagagagtgatcctggccgacgctaatctggacaaggtgctgagcgcctacaacaagcacagagacaagcctatcagagagcaggccgagaatatcatccacctgtttaccctgaccaatctgggagcccctgccgccttcaagtactttgacaccaccatcgaccggaagaggtacaccagcaccaaagaggtgctggacgccaccctgatccaccagagcatcaccggcctgtacgagacacggatcgacctgtctcagctgggaggcgacgcctatccctatgacgtgcccgattatgccagcctgggcagcggctcccccaagaaaaaacgcaaggtggaagatcctaagaaaaagcggaaagtggacggcattggtagtgggagcaacggcagcagcggatccaacggtccgactgacgccgcggaagaagaacttttgagcaagaattatcatcttgagaacgaagtggctcgtcttaagaaaggttctggcagtggagaagaactgctttcaaagaattaccacctggaaaatgaggtagctagactgaaaaaggggagcggaagtggggaggagttgctgagcaaaaattatcatttggagaacgaagtagcacgactaaagaaagggtccggatcgggtgaggagttactctcgaaaaattatcatctcgaaaacgaagtggctcggctaaaaaagggcagtggttctggagaagagctattatctaaaaactaccacctcgaaaatgaggtggcacgcttaaaaaagggaagtggcagtggtgaagagctactatccaagaattatcatcttgagaacgaggtagcgcgtttgaagaagggttccggctcaggagaggaactgctctcgaagaactatcatcttgaaaatgaggtcgctcgattaaaaaagggatcgggcagtggtgaggaactactttcaaagaattaccacctcgaaaacgaagtagctcgattaaagaaaggttcagggtcgggtgaagaattactgagtaaaaattatcatctggaaaatgaggtagcgagactaaaaaaggggagtggttctggcgaggaattgctatcgaaaaattatcatcttgagaacgaagttgctaggctcaaaaagggctcaggctcaggc

SEQ ID NO: 768 - DNA, 1994 bp, Artificial Sequence; identical to SEQ ID NO: 431
  Synthetic Construct

SEQ ID NO: 769 - DNA, 115 bp, Artificial Sequence; identical to SEQ ID NO: 419
  Synthetic Construct

SEQ ID NO: 770 - DNA, 4107 bp, Artificial Sequence
  Synthetic Construct
atggacaagaagtacagcatcggcctggccatcggcaccaactctgtgggctgggccgtgatcaccgacgagtacaaggtgcccagcaagaaattcaaggtgctgggcaacaccgaccggcacagcatcaagaagaacctgatcggcgccctgctgttcgacagcggagaaacagccgaggccacccggctgaagagaaccgccagaagaagatacaccagacggaagaaccggatctgctatctgcaagagatcttcagcaacgagatggccaaggtggacgacagcttcttccacagactggaagagtccttcctggtggaagaggataagaagcacgagcggcaccccatcttcggcaacatcgtggacgaggtggcctaccacgagaagtaccccaccatctaccacctgagaaagaaactggtggacagcaccgacaaggccgacctgcggctgatctatctggccctggcccacatgatcaagttccggggccacttcctgatcgagggcgacctgaaccccgacaacagcgacgtggacaagctgttcatccagctggtgcagacctacaaccagctgttcgaggaaaaccccatcaacgccagcggcgtggacgccaaggccatcctgtctgccagactgagcaagagcagacggctggaaaatctgatcgcccagctgcccggcgagaagaagaatggcctgttcggcaacctgattgccctgagcctgggcctgacccccaacttcaagagcaacttcgacctggccgaggatgccaaactgcagctgagcaaggacacctacgacgacgacctggacaacctgctggcccagatcggcgaccagtacgccgacctgtttctggccgccaagaacctgtccgacgccatcctgctgagcgacatcctgagagtgaacaccgagatcaccaaggcccccctgagcgcctctatgatcaagagatacgacgagcaccaccaggacctgaccctgctgaaagctctcgtgcggcagcagctgcctgagaagtacaaagagattttcttcgaccagagcaagaacggctacgccggctacatcgatggcggagccagccaggaagagttctacaagttcatcaagcccatcctggaaaagatggacggcaccgaggaactgctcgtgaagctgaacagagaggacctgctgcggaagcagcggaccttcgacaacggcagcatcccccaccagatccacctgggagagctgcacgccattctgcggcggcaggaagatttttacccattcctgaaggacaaccgggaaaagatcgagaagatcctgaccttccgcatcccctactacgtgggccctctggccaggggaaacagcagattcgcctggatgaccagaaagagcgaggaaaccatcaccccctggaacttcgaggaagtggtggacaagggcgccagcgcccagagcttcatcgagcggatgaccaacttcgataagaacctgcccaacgagaaggtgctgcccaagcacagcctgctgtacgagtacttcaccgtgtacaacgagctgaccaaagtgaaatacgtgaccgagggaatgagaaagcccgccttcctgagcggcgagcagaaaaaagccatcgtggacctgctgttcaagaccaaccggaaagtgaccgtgaagcagctgaaagaggactacttcaagaaaatcgagtgcttcgactccgtggaaatctccggcgtggaagatcggttcaacgcctccctgggcacataccacgatctgctgaaaattatcaaggacaaggacttcctggacaatgaggaaaacgaggacattctggaagatatcgtgctgaccctgacactgtttgaggacagagagatgatcgaggaacggctgaaaacctatgcccacctgttcgacgacaaagtgatgaagcagctgaagcggcggagatacaccggctggggcaggctgagccggaagctgatcaacggcatccgggacaagcagtccggcaagacaatcctggatttcctgaagtccgacggcttcgccaacagaaacttcatgcagctgatccacgacgacagcctgacctttaaagaggacatccagaaagcccaggtgtccggccagggcgatagcctgcacgagcacattgccaatctggccggcagccccgccattaagaagggcatcctgcagacagtgaaggtggtggacgagctcgtgaaagtgatgggccggcacaagcccgagaacatcgtgatcgaaatggccagagagaaccagaccacccagaagggacagaagaacagccgcgagagaatgaagcggatcgaagagggcatcaaagagctgggcagccagatcctgaaagaacaccccgtggaaaacacccagctgcagaacgagaagctgtacctgtactacctgcagaatgggcgggatatgtacgtggaccaggaactggacatcaaccggctgtccgactacgatgtggacgctatcgtgcctcagagctttctgaaggacgactccatcgataacaaagtgctgactcggagcgacaagaaccggggcaagagcgacaacgtgccctccgaagaggtcgtgaagaagatgaagaactactggcgccagctgctgaatgccaagctgattacccagaggaagttcgacaatctgaccaaggccgagagaggcggcctgagcgaactggataaggccggcttcatcaagagacagctggtggaaacccggcagatcacaaagcacgtggcacagatcctggactcccggatgaacactaagtacgacgagaacgacaaactgatccgggaagtgaaagtgatcaccctgaagtccaagctggtgtccgatttccggaaggatttccagttttacaaagtgcgcgagatcaacaactaccaccacgcccacgacgcctacctgaacgccgtcgtgggaaccgccctgatcaaaaagtaccctaagctggaaagcgagttcgtgtacggcgactacaaggtgtacgacgtgcggaagatgatcgccaagagcgagcaggaaatcggcaaggctaccgccaagtacttcttctacagcaacatcatgaactttttcaagaccgagattaccctggccaacggcgagatccggaagcggcctctgatcgagacaaacggcgaaacaggcgagatcgtgtgggataagggccgggactttgccaccgtgcggaaagtgctgtctatgccccaagtgaatatcgtgaaaaagaccgaggtgcagacaggcggcttcagcaaagagtctatcctgcccaagaggaacagcgacaagctgatcgccagaaagaaggactgggaccctaagaagtacggcggcttcgacagccccaccgtggcctattctgtgctggtggtggccaaagtggaaaagggcaagtccaagaaactgaagagtgtgaaagagctgctggggatcaccatcatggaaagaagcagcttcgagaagaatcccatcgactttctggaagccaagggctacaaagaagtgaaaaaggacctgatcatcaagctgcctaagtactccctgttcgagctggaaaacggccggaagagaatgctggcctctgccggcgaactgcagaagggaaacgaactggccctgccctccaaatatgtgaacttcctgtacctggccagccactatgagaagctgaagggctcccccgaggataatgagcagaaacagctgtttgtggaacagcacaaacactacctggacgagatcatcgagcagatcagcgagttctccaagagagtgatcctggccgacgctaatctggacaaggtgctgagcgcctacaacaagcacagagacaagcctatcagagagcaggccgagaatatcatccacctgtttaccctgaccaatctgggagcccctgccgccttcaagtactttgacaccaccatcgaccggaagaggtacaccagcaccaaagaggtgctggacgccaccctgatccaccagagcatcaccggcctgtacgagacacggatcgacctgtctcagctgggaggcgacgcc

SEQ ID NO: 771 - DNA, 27 bp, Artificial Sequence
  Synthetic Construct
tatccctatgacgtgcccgattatgcc

SEQ ID NO: 772 - DNA, 21 bp, Artificial Sequence
  Synthetic Construct
cccaagaaaaaacgcaaggtg

SEQ ID NO: 773 - DNA, 60 bp, Artificial Sequence; identical to SEQ ID NO: 442
  Synthetic Construct

SEQ ID NO: 774 - DNA, 723 bp, Artificial Sequence
  Synthetic Construct
gaagaagaacttttgagcaagaattatcatcttgagaacgaagtggctcgtcttaagaaaggttctggcagtggagaagaactgctttcaaagaattaccacctggaaaatgaggtagctagactgaaaaaggggagcggaagtggggaggagttgctgagcaaaaattatcatttggagaacgaagtagcacgactaaagaaagggtccggatcgggtgaggagttactctcgaaaaattatcatctcgaaaacgaagtggctcggctaaaaaagggcagtggttctggagaagagctattatctaaaaactaccacctcgaaaatgaggtggcacgcttaaaaaagggaagtggcagtggtgaagagctactatccaagaattatcatcttgagaacgaggtagcgcgtttgaagaagggttccggctcaggagaggaactgctctcgaagaactatcatcttgaaaatgaggtcgctcgattaaaaaagggatcgggcagtggtgaggaactactttcaaagaattaccacctcgaaaacgaagtagctcgattaaagaaaggttcagggtcgggtgaagaattactgagtaaaaattatcatctggaaaatgaggtagcgagactaaaaaaggggagtggttctggcgaggaattgctatcgaaaaattatcatcttgagaacgaagttgctaggctcaaaaagggctcaggctcaggc

SEQ ID NO: 775 - DNA, 768 bp, Artificial Sequence; identical to SEQ ID NO: 433
  Synthetic Construct

SEQ ID NO: 776 - protein, 1661 aa, Artificial Sequence
  Synthetic Construct
MDKKYSIGLAIGTNSVGWAVITDEYKVPSKKFKVLGNTDRHSIKKNLIGALLFDSGETAEATRLKRTARRRYTRRKNRICYLQEIFSNEMAKVDDSFFHRLEESFLVEEDKKHERHPIFGNIVDEVAYHEKYPTIYHLRKKLVDSTDKADLRLIYLALAHMIKFRGHFLIEGDLNPDNSDVDKLFIQLVQTYNQLFEENPINASGVDAKAILSARLSKSRRLENLIAQLPGEKKNGLFGNLIALSLGLTPNFKSNFDLAEDAKLQLSKDTYDDDLDNLLAQIGDQYADLFLAAKNLSDAILLSDILRVNTEITKAPLSASMIKRYDEHHQDLTLLKALVRQQLPEKYKEIFFDQSKNGYAGYIDGGASQEEFYKFIKPILEKMDGTEELLVKLNREDLLRKQRTFDNGSIPHQIHLGELHAILRRQEDFYPFLKDNREKIEKILTFRIPYYVGPLARGNSRFAWMTRKSEETITPWNFEEVVDKGASAQSFIERMTNFDKNLPNEKVLPKHSLLYEYFTVYNELTKVKYVTEGMRKPAFLSGEQKKAIVDLLFKTNRKVTVKQLKEDYFKKIECFDSVEISGVEDRFNASLGTYHDLLKIIKDKDFLDNEENEDILEDIVLTLTLFEDREMIEERLKTYAHLFDDKVMKQLKRRRYTGWGRLSRKLINGIRDKQSGKTILDFLKSDGFANRNFMQLIHDDSLTFKEDIQKAQVSGQGDSLHEHIANLAGSPAIKKGILQTVKVVDELVKVMGRHKPENIVIEMARENQTTQKGQKNSRERMKRIEEGIKELGSQILKEHPVENTQLQNEKLYLYYLQNGRDMYVDQELDINRLSDYDVDAIVPQSFLKDDSIDNKVLTRSDKNRGKSDNVPSEEVVKKMKNYWRQLLNAKLITQRKFDNLTKAERGGLSELDKAGFIKRQLVETRQITKHVAQILDSRMNTKYDENDKLIREVKVITLKSKLVSDFRKDFQFYKVREINNYHHAHDAYLNAVVGTALIKKYPKLESEFVYGDYKVYDVRKMIAKSEQEIGKATAKYFFYSNIMNFFKTEITLANGEIRKRPLIETNGETGEIVWDKGRDFATVRKVLSMPQVNIVKKTEVQTGGFSKESILPKRNSDKLIARKKDWDPKKYGGFDSPTVAYSVLVVAKVEKGKSKKLKSVKELLGITIMERSSFEKNPIDFLEAKGYKEVKKDLIIKLPKYSLFELENGRKRMLASAGELQKGNELALPSKYVNFLYLASHYEKLKGSPEDNEQKQLFVEQHKHYLDEIIEQISEFSKRVILADANLDKVLSAYNKHRDKPIREQAENIIHLFTLTNLGAPAAFKYFDTTIDRKRYTSTKEVLDATLIHQSITGLYETRIDLSQLGGDAYPYDVPDYASLGSGSPKKKRKVEDPKKKRKVDGIGSGSNGSSGSNGPTDAAEEELLSKNYHLENEVARLKKGSGSGEELLSKNYHLENEVARLKKGSGSGEELLSKNYHLENEVARLKKGSGSGEELLSKNYHLENEVARLKKGSGSGEELLSKNYHLENEVARLKKGSGSGEELLSKNYHLENEVARLKKGSGSGEELLSKNYHLENEVARLKKGSGSGEELLSKNYHLENEVARLKKGSGSGEELLSKNYHLENEVARLKKGSGSGEELLSKNYHLENEVARLKKGSGSG

SEQ ID NO: 777 - protein, 1369 aa, Artificial Sequence; identical to SEQ ID NO: 439
  Synthetic Construct

SEQ ID NO: 778 - protein, 9 aa, Artificial Sequence
  Synthetic Construct
YPYDVPDYA

SEQ ID NO: 779 - protein, 7 aa, Artificial Sequence
  Synthetic Construct
PKKKRKV

SEQ ID NO: 780 - protein, 20 aa, Artificial Sequence
  Synthetic Construct
DGIGSGSNGSSGSNGPTDAA

SEQ ID NO: 781 - protein, 241 aa, Artificial Sequence; identical to SEQ ID NO: 443
  Synthetic Construct

SEQ ID NO: 782 - DNA, 5262 bp, Artificial Sequence
  Synthetic Construct
atgcatatgagtctagctcaacagagcttttaacccaaattggtacaatagaatacaactttagatcataattctcaaaagaaagagattccttagctattctatctgccactccatttccttctcggcttgtatgcacaagcataaaatcctcaaacttgctaagtagatactttatgtcttggataattggattgagacttgacaagcataactttcatgtaaccaaagacacaagttgctgagaatccacctcaaaaatgatcttcctataattgaatcgggataatgacagcacagcccatctaagagcctccacttctacttccagcacgcttcttacttttaccacagctcttgcacctaaccataacaccttccctgtatgatcgcgaagcacccaccctaagccacattttaatccttctgttggccatgccccatcaaagttgcacttaacccaagattgtggtggagcttcccatgtttctcgtctgtcccgacggtgttgtggttggtgctttccttacattctgagcctctttccttctaatccactcatctgcatcttcttgtgtccttactaatacctcattggttccaaattccctccctttaagcaccagctcgtttctgttcttccacagcctcccaagtatccaagggactaaagcctccacattcttcagatcaggatattcttgtttaagatgttgaactctatggaggtttgtatgaactgatgatctaggaccggataagttcccttcttcatagcgaacttattcaaagaatgttttgtgtatcattcttgttacattgttattaatgaaaaaatattattggtcattggactgaacacgagtgttaaatatggaccaggccccaaataagatccattgatatatgaattaaataacaagaataaatcgagtcaccaaaccacttgccttttttaacgagacttgttcaccaacttgatacaaaagtcattatcctatgcaaatcaataatcatacaaaaatatccaataacactaaaaaattaaaagaaatggataatttcacaatatgttatacgataaagaagttacttttccaagaaattcactgattttataagcccacttgcattagataaatggcaaaaaaaaacaaaaaggaaaagaaataaagcacgaagaattctagaaaatacgaaatacgcttcaatgcagtgggacccacggttcaattattgccaattttcagctccaccgtatatttaaaaaataaaacgataatgctaaaaaaatataaatcgtaacgatcgttaaatctcaacggctggatcttatgacgaccgttagaaattgtggttgtcgacgagtcagtaataaacggcgtcaaagtggttgcagccggcacacacgagtcgtgtttatcaactcaaagcacaaatacttttcctcaacctaaaaataaggcaattagccaaaaacaactttgcgtgtaaacaacgctcaatacacgtgtcattttattattagctattgcttcaccgccttagctttctcgtgacctagtcgtcctcgtcttttcttcttcttcttctataaaacaatacccaaagagctcttcttcttcacaattcagatttcaatttctcaaaatcttaaaaactttctctcaattctctctaccgtgatcaaggtaaatttctgtgttccttattctctcaaaatcttcgattttgttttcgttcgatcccaatttcgtatatgttctttggtttagattctgttaatcttagatcgaagacgattttctgggtttgatcgttagatatcatcttaattctcgattagggtttcatagatatcatccgatttgttcaaataatttgagttttgtcgaataattactcttcgatttgtgatttctatctagatctggtgttagtttctagtttgtgcgatcgaatttgtcgattaatctgagtttttctgattaacacctagggtttatgggccccgacatcgtgatgacccagagccccagcagcctgagcgccagcgtgggcgaccgcgtgaccatcacctgccgcagcagcaccggcgccgtgaccaccagcaactacgccagctgggtgcaggagaagcccggcaagctgttcaagggcctgatcggcggcaccaacaaccgcgcccccggcgtgcccagccgcttcagcggcagcctgatcggcgacaaggccaccctgaccatcagcagcctgcagcccgaggacttcgccacctacttctgcgccctgtggtacagcaaccactgggtgttcggccagggcaccaaggtggagctgaagcgcggcggcggcggcagcggcggcggcggcagcggcggcggcggcagcagcggcggcggcagcgaggtgaagctgctggagagcggcggcggcctggtgcagcccggcggcagcctgaagctgagctgcgccgtgagcggcttcagcctgaccgactacggcgtgaactgggtgcgccaggcccccggccgcggcctggagtggatcggcgtgatctggggcgacggcatcaccgactacaacagcgccctgaaggaccgcttcatcatcagcaaggacaacggcaagaacaccgtgtacctgcagatgagcaaggtgcgcagcgacgacaccgccctgtactactgcgtgaccggcctgttcgactactggggccagggcaccctggtgaccgtgagcagctacccatacgatgttccagattacgctggtggaggcggaggttctgggggaggaggtagtggcggtggtggttcaggaggcggcggaagcttggatccaggtggaggtggaagcggtagcaaaggagaagaacttttcactggagttgtcccaattcttgttgaattagatggtgatgttaatgggcacaaattttctgtccgtggagagggtgaaggtgatgctacaaacggaaaactcacccttaaatttatttgcactactggaaaactacctgttccgtggccaacacttgtcactactctgacctatggtgttcaatgcttttcccgttatccggatcacatgaaacggcatgactttttcaagagtgccatgcccgaaggttatgtacaggaacgcactatatctttcaaagatgacgggacctacaagacgcgtgctgaagtcaagtttgaaggtgatacccttgttaatcgtatcgagttaaagggtattgattttaaagaagatggaaacattcttggacacaaactcgagtacaactttaactcacacaatgtatacatcacggcagacaaacaaaagaatggaatcaaagctaacttcaaaattcgccacaacgttgaagatggttccgttcaactagcagaccattatcaacaaaatactccaattggcgatggccctgtccttttaccagacaaccattacctgtcgacacaatctgtcctttcgaaagatcccaacgaaaagcgtgaccacatggtccttcttgagtttgtaactgctgctgggattacacatggcatggatgagctctacaaaggtggaggtcggaccggtcgtacgggcggtggcggaggggagacaattcgtttgcccaaacctatgattgggtttggggttcctaccgaaccacttccagcaatggttcgaagaactcttcccgagcaagctgttggacccccgtttttctactatgaaaatgtggctctagctccaaagggtgtgtgggacacaatttctagatttttgtacgatattgagccagagtttgtcgactccaaatatttttgtgctgctgcaagaaaaaggggttatattcataatctgccggttgaaaatagatttcctttgtttccacttgccccacgtaccattcatgaggcacttcccctatcgaagaaatggtggccatcttgggacccacggacaaagttaaattgtttgcaaacagccattggaagtgcacaattgacgaataggattaggaaagctgtggaggactttgatggtgagccaccaatgagagttcagaagtttgttcttgatcaatgtcggaagtggaatttggtgtgggttgggagaaacaaagttgctcctttggagcctgatgaagttgaaatgctactgggatttccaaagaaccatactaggggaggtggtataagtaggaccgatagatacaagtcgcttggtaattcattccaggttgacactgtggcataccatttgtcggtattgaaagacttgtttcccggtggtatcaatgtcttatcactcttctctggaattggcggtggtgaagttgctctttatcgtcttggtattccactaaacacagtggtttctgtggaaaaatctgaagtcaacagggatattgtgagaagctggtgggagcaaactaatcagagagggaaccttatacattttaacgatgtgcagcagctgaatggagaccgcttggagcaactgatagagtcatttggaggatttgatttggtaattggtggaagcccgtgcaataaccttgcaggcagtaacagagtgagcagggatgggcttgaaggcaaagagtcttccctattttatgactatgttcggatattggacttggtcaagtccataatgtccagacataaacatggcggtggcggaggggctccaaagaagaagagaaaggtccgtacgggaggaggatctcggaccgaagagtacaagcttatcctgaacggtaaaaccctgaaaggtgaaaccaccaccgaagctgttgacgctgctaccgcggaaaaagttttcaaacagtacgctaacgacaacggtgttgacggtgaatggacctacgacgacgctaccaaaaccttcacggtaaccgaaggtggtggtagcggtggtggtactagtccaaaaacaaggaggagaccgcgaagatcacaacggaaaaggccgcctacgccatggccgtaagtttgagctcgaatttccccgatcgttcaaacatttggcaataaagtttcttaagattgaatcctgttgccggtcttgcgatgattatcatataatttctgttgaattacgttaagcatgtaataattaacatgtaatgcatgacgttatttatgagatgggtttttatgattagagtcccgcaattatacatttaatacgcgatagaaaacaaaatatagcgcgcaaactaggataaattatcgcgcgcggtgtcatctatgttac

SEQ ID NO: 783 - DNA, 1994 bp, Artificial Sequence; identical to SEQ ID NO: 431
  Synthetic Construct

SEQ ID NO: 784 - DNA, 831 bp, Artificial Sequence
  Synthetic Construct
atgggccccgacatcgtgatgacccagagccccagcagcctgagcgccagcgtgggcgaccgcgtgaccatcacctgccgcagcagcaccggcgccgtgaccaccagcaactacgccagctgggtgcaggagaagcccggcaagctgttcaagggcctgatcggcggcaccaacaaccgcgcccccggcgtgcccagccgcttcagcggcagcctgatcggcgacaaggccaccctgaccatcagcagcctgcagcccgaggacttcgccacctacttctgcgccctgtggtacagcaaccactgggtgttcggccagggcaccaaggtggagctgaagcgcggcggcggcggcagcggcggcggcggcagcggcggcggcggcagcagcggcggcggcagcgaggtgaagctgctggagagcggcggcggcctggtgcagcccggcggcagcctgaagctgagctgcgccgtgagcggcttcagcctgaccgactacggcgtgaactgggtgcgccaggcccccggccgcggcctggagtggatcggcgtgatctggggcgacggcatcaccgactacaacagcgccctgaaggaccgcttcatcatcagcaaggacaacggcaagaacaccgtgtacctgcagatgagcaaggtgcgcagcgacgacaccgccctgtactactgcgtgaccggcctgttcgactactggggccagggcaccctggtgaccgtgagcagctacccatacgatgttccagattacgctggtggaggcggaggttctgggggaggaggtagtggcggtggtggttcaggaggcggcggaagc

SEQ ID NO: 785 - DNA, 711 bp, Artificial Sequence
  Synthetic Construct
agcaaaggagaagaacttttcactggagttgtcccaattcttgttgaattagatggtgatgttaatgggcacaaattttctgtccgtggagagggtgaaggtgatgctacaaacggaaaactcacccttaaatttatttgcactactggaaaactacctgttccgtggccaacacttgtcactactctgacctatggtgttcaatgcttttcccgttatccggatcacatgaaacggcatgactttttcaagagtgccatgcccgaaggttatgtacaggaacgcactatatctttcaaagatgacgggacctacaagacgcgtgctgaagtcaagtttgaaggtgatacccttgttaatcgtatcgagttaaagggtattgattttaaagaagatggaaacattcttggacacaaactcgagtacaactttaactcacacaatgtatacatcacggcagacaaacaaaagaatggaatcaaagctaacttcaaaattcgccacaacgttgaagatggttccgttcaactagcagaccattatcaacaaaatactccaattggcgatggccctgtccttttaccagacaaccattacctgtcgacacaatctgtcctttcgaaagatcccaacgaaaagcgtgaccacatggtccttcttgagtttgtaactgctgctgggattacacatggcatggatgagctctacaaa

SEQ ID NO: 786 - DNA, 15 bp, Artificial Sequence
  Synthetic Construct
ggcggtggcggaggg

SEQ ID NO: 787 - DNA, 1062 bp, Artificial Sequence
  Synthetic Construct
gagacaattcgtttgcccaaacctatgattgggtttggggttcctaccgaaccacttccagcaatggttcgaagaactcttcccgagcaagctgttggacccccgtttttctactatgaaaatgtggctctagctccaaagggtgtgtgggacacaatttctagatttttgtacgatattgagccagagtttgtcgactccaaatatttttgtgctgctgcaagaaaaaggggttatattcataatctgccggttgaaaatagatttcctttgtttccacttgccccacgtaccattcatgaggcacttcccctatcgaagaaatggtggccatcttgggacccacggacaaagttaaattgtttgcaaacagccattggaagtgcacaattgacgaataggattaggaaagctgtggaggactttgatggtgagccaccaatgagagttcagaagtttgttcttgatcaatgtcggaagtggaatttggtgtgggttgggagaaacaaagttgctcctttggagcctgatgaagttgaaatgctactgggatttccaaagaaccatactaggggaggtggtataagtaggaccgatagatacaagtcgcttggtaattcattccaggttgacactgtggcataccatttgtcggtattgaaagacttgtttcccggtggtatcaatgtcttatcactcttctctggaattggcggtggtgaagttgctctttatcgtcttggtattccactaaacacagtggtttctgtggaaaaatctgaagtcaacagggatattgtgagaagctggtgggagcaaactaatcagagagggaaccttatacattttaacgatgtgcagcagctgaatggagaccgcttggagcaactgatagagtcatttggaggatttgatttggtaattggtggaagcccgtgcaataaccttgcaggcagtaacagagtgagcagggatgggcttgaaggcaaagagtcttccctattttatgactatgttcggatattggacttggtcaagtccataatgtccagacataaacat

SEQ ID NO: 788 - DNA, 24 bp, Artificial Sequence
  Synthetic Construct
gctccaaagaagaagagaaaggtc

SEQ ID NO: 789 - DNA, 165 bp, Artificial Sequence
  Synthetic Construct
gagtacaagcttatcctgaacggtaaaaccctgaaaggtgaaaccaccaccgaagctgttgacgctgctaccgcggaaaaagttttcaaacagtacgctaacgacaacggtgttgacggtgaatggacctacgacgacgctaccaaaaccttcacggtaaccgaa

SEQ ID NO: 790 - DNA, 63 bp, Artificial Sequence
  Synthetic Construct
ccaaaaacaaggaggagaccgcgaagatcacaacggaaaaggccgcctacgccatggccgtaa

SEQ ID NO: 791 - DNA, 263 bp, Artificial Sequence; identical to SEQ ID NO: 435
  Synthetic Construct

SEQ ID NO: 792 - protein, 996 aa, Artificial Sequence
  Synthetic Construct
MGPDIVMTQSPSSLSASVGDRVTITCRSSTGAVTTSNYASWVQEKPGKLFKGLIGGTNNRAPGVPSRFSGSLIGDKATLTISSLQPEDFATYFCALWYSNHWVFGQGTKVELKRGGGGSGGGGSGGGGSSGGGSEVKLLESGGGLVQPGGSLKLSCAVSGFSLTDYGVNWVRQAPGRGLEWIGVIWGDGITDYNSALKDRFIISKDNGKNTVYLQMSKVRSDDTALYYCVTGLFDYWGQGTLVTVSSYPYDVPDYAGGGGGSGGGGSGGGGSGGGGSLDPGGGGSGSKGEELFTGVVPILVELDGDVNGHKFSVRGEGEGDATNGKLTLKFICTTGKLPVPWPTLVTTLTYGVQCFSRYPDHMKRHDFFKSAMPEGYVQERTISFKDDGTYKTRAEVKFEGDTLVNRIELKGIDFKEDGNILGHKLEYNFNSHNVYITADKQKNGIKANFKIRHNVEDGSVQLADHYQQNTPIGDGPVLLPDNHYLSTQSVLSKDPNEKRDHMVLLEFVTAAGITHGMDELYKGGGRTGRTGGGGGETIRLPKPMIGFGVPTEPLPAMVRRTLPEQAVGPPFFYYENVALAPKGVWDTISRFLYDIEPEFVDSKYFCAAARKRGYIHNLPVENRFPLFPLAPRTIHEALPLSKKWWPSWDPRTKLNCLQTAIGSAQLTNRIRKAVEDFDGEPPMRVQKFVLDQCRKWNLVWVGRNKVAPLEPDEVEMLLGFPKNHTRGGGISRTDRYKSLGNSFQVDTVAYHLSVLKDLFPGGINVLSLFSGIGGGEVALYRLGIPLNTVVSVEKSEVNRDIVRSWWEQTNQRGNLIHFNDVQQLNGDRLEQLIESFGGFDLVIGGSPCNNLAGSNRVSRDGLEGKESSLFYDYVRILDLVKSIMSRHKHGGGGGAPKKKRKVRTGGGSRTEEYKLILNGKTLKGETTTEAVDAATAEKVFKQYANDNGVDGEWTYDDATKTFTVTEGGGSGGGTSPKTRRRPRRSQRKRPPTPWP

SEQ ID NO: 793 - protein, 277 aa, Artificial Sequence; identical to SEQ ID NO: 445
  Synthetic Construct

SEQ ID NO: 794 - protein, 237 aa, Artificial Sequence; identical to SEQ ID NO: 446
  Synthetic Construct

SEQ ID NO: 795 - protein, 5 aa, Artificial Sequence
  Synthetic Construct
GGGGG

SEQ ID NO: 796 - protein, 354 aa, Artificial Sequence; identical to SEQ ID NO: 679
  Synthetic Construct

SEQ ID NO: 797 - protein, 8 aa, Artificial Sequence
  Synthetic Construct
APKKKRKV

SEQ ID NO: 798 - protein, 55 aa, Artificial Sequence; identical to SEQ ID NO: 449
  Synthetic Construct

SEQ ID NO: 799 - protein, 20 aa, Artificial Sequence
  Synthetic Construct
PKTRRRPRRSQRKRPPTPWP

SEQ ID NO: 800 - DNA, 553 bp, Artificial Sequence
  Synthetic Construct
aagctttcgttgaacaacggaaactcgacttgccttccgcacaatacatcatttcttcttagctttttttcttcttcttcgttcatacagtttttttttgtttatcagcttacattttcttgaaccgtagctttcgttttcttctttttaactttccattcggagtttttgtatcttgtttcatagtttgtcccaggattagaatgattaggcatcgaaccttcaagaatttgattgaataaaacatcttcattcttaagatatgaagataatcttcaaaaggcccctgggaatctgaaagaagagaagcaggcccatttatatgggaaagaacaatagtatttcttatataggcccatttaagttgaaaacaatcttcaaaagtcccacatcgcttagataagaaaacgaagctgagtttatatacagctagagtcgaagtagtgattgacggaaagatgtatgggcttgttttagagctagaaatagcaagttaaaataaggctagtccgttatcaacttgaaaaagtggcaccgagtcggtgcttttttt

SEQ ID NO: 801 - DNA, 450 bp, Artificial Sequence
  Synthetic Construct
aagctttcgttgaacaacggaaactcgacttgccttccgcacaatacatcatttcttcttagctttttttcttcttcttcgttcatacagtttttttttgtttatcagcttacattttcttgaaccgtagctttcgttttcttctttttaactttccattcggagtttttgtatcttgtttcatagtttgtcccaggattagaatgattaggcatcgaaccttcaagaatttgattgaataaaacatcttcattcttaagatatgaagataatcttcaaaaggcccctgggaatctgaaagaagagaagcaggcccatttatatgggaaagaacaatagtatttcttatataggcccatttaagttgaaaacaatcttcaaaagtcccacatcgcttagataagaaaacgaagctgagtttatatacagctagagtcgaagtagtgattg

SEQ ID NO: 802 - DNA, 20 bp, Artificial Sequence
  Synthetic Construct
acggaaagatgtatgggctt

SEQ ID NO: 803 - DNA, 76 bp, Artificial Sequence; identical to SEQ ID NO: 638
  Synthetic Construct

SEQ ID NO: 804 - DNA, 7 bp, Artificial Sequence
  Synthetic Construct
ttttttt

SEQ ID NO: 805 - DNA, 820 bp, Artificial Sequence
  Synthetic Construct
aagctttcgttgaacaacggaaactcgacttgccttccgcacaatacatcatttcttcttagctttttttcttcttcttcgttcatacagtttttttttgtttatcagcttacattttcttgaaccgtagctttcgttttcttctttttaactttccattcggagtttttgtatcttgtttcatagtttgtcccaggattagaatgattaggcatcgaaccttcaagaatttgattgaataaaacatcttcattcttaagatatgaagataatcttcaaaaggcccctgggaatctgaaagaagagaagcaggcccatttatatgggaaagaacaatagtatttcttatataggcccatttaagttgaaaacaatcttcaaaagtcccacatcgcttagataagaaaacgaagctgagtttatatacagctagagtcgaagtagtgattgaacaaagcaccagtggtctagtggtagaatagtaccctgccacggtacagacccgggttcgattcccggctggtgcagacggaaagatgtatgggcttgttttagagctagaaatagcaagttaaaataaggctagtccgttatcaacttgaaaaagtggcaccgagtcggtgcgtttaacaaagcaccagtggtctagtggtagaatagtaccctgccacggtacagacccgggttcgattcccggctggtgcaaaaactaggccatccatggagttttagagctagaaatagcaagttaaaataaggctagtccgttatcaacttgaaaaagtggcaccgagtcggtgcgtttaaacaaacttttttt

SEQ ID NO: 806 - protein, 24 aa, Artificial Sequence
  Synthetic Construct
EELLSKNYHLENEVARLKKGSGSG

SEQ ID NO: 807 - protein, 718 aa, Artificial Sequence
  Synthetic Construct
LPTCSCLDRVIQKDKGPYYTHLGAGPSVAAVREIMENRYGQKGNAIRIEIVVYTGKEGKSSHGCPIAKWVLRRSSDEEKVLCLVRQRTGHHCPTAVMVVLIMVWDGIPLPMADRLYTELTENLKSYNGHPTDRRCTLNENRTCTCQGIDPETCGASFSFGCSWSMYFNGCKFGRSPSPRRFRIDPSSPLHEKNLEDNLQSLATRLAPIYKQYAPVAYQNQVEYENVARECRLGSKEGRPFSGVTACLDFCAHPHRDIHNMNNGSTVVCTLTREDNRSLGVIPQDEQLHVLPLYKLSDTDEFGSKEGMEAKIKSGAIEVLAPRRKKRTCFTQPVPRSGKKRAAMMTEVLAHKIRAVEKKPIPRIKRKNNSTTTNNSKPSSLPTLGSNTETVQPEVKSETEPHFILKSSDNTKTYSLMPSAPHPVKEASPGFSWSPKTASATPAPLKNDATASCGFSERSSTPHCTMPSGRLSGANAAAADGPGISQLGEVAPLPTLSAPVMEPLINSEPSTGVTEPLTPHQPNHQPSFLTSPQDLASSPMEEDEQHSEADEPPSDEPLSDDPLSPAEEKLPHIDEYWSDSEHIFLDANIGGVAIAPAHGSVLIECARRELHATTPVEHPNRNHPTRLSLVFYQHKNLNKPQHGFELNKIKFEAKEAKNKKMKASEQKDQAANEGPEQSSEVNELNQIPSHKALTLTHDNVVTVSPYALTHVAGPYNHWV

SEQ ID NO: 808 - protein, 912 aa, Homo sapiens
MPAMPSSGPGDTSSSAAEREEDRKDGEEQEEPRGKEERQEPSTTARKVGRPGRKRKHPPVESGDTPKDPAVISKSPSMAQDSGASELLPNGDLEKRSEPQPEEGSPAGGQKGGAPAEGEGAAETLPEASRAVENGCCTPKEGRGAPAEAGKEQKETNIESMKMEGSRGRLRGGLGWESSLRQRPMPRLTFQAGDPYYISKRKRDEWLARWKREAEKKAKVIAGMNAVEENQGPGESQKVEEASPPAVQQPTDPASPTVATTPEPVGSDAGDKNATKAGDDEPEYEDGRGFGIGELVWGKLRGFSWWPGRIVSWWMTGRSRAAEGTRWVMWFGDGKFSVVCVEKLMPLSSFCSAFHQATYNKQPMYRKAIYEVLQVASSRAGKLFPVCHDSDESDTAKAVEVQNKPMIEWALGGFQPSGPKGLEPPEEEKNPYKEVYTDMWVEPEAAAYAPPPPAKKPRKSTAEKPKVKEIIDERTRERLVYEVRQKCRNIEDICISCGSLNVTLEHPLFVGGMCQNCKNCFLECAYQYDDDGYQSYCTICCGGREVLMCGNNNCCRCFCVECVDLLVGPGAAQAAIKEDPWNCYMCGHKGTYGLLRRREDWPSRLQMFFANNHDQEFDPPKVYPPVPAEKRKPIRVLSLFDGIATGLLVLKDLGIQVDRYIASEVCEDSITVGMVRHQGKIMYVGDVRSVTQKHIQEWGPFDLVIGGSPCNDLSIVNPARKGLYEGTGRLFFEFYRLLHDARPKEGDDRPFFWLFENVVAMGVSDKRDISRFLESNPVMIDAKEVSAAHRARYFWGNLPGMNRPLASTVNDKLELQECLEHGRIAKFSKVRTITTRSNSIKQGKDQHFPVFMNEKEDILWCTEMERVFGFPVHYTDVSNMSRLARQRLLGRSWSVPVIRHLFAPLKEYFACV

SEQ ID NO: 809 - protein, 909 aa, Pan Paniscus
MPSSGPGDTSSSAAEREEDRKDGEEQEEPRGKEERQEPSTTARKVGRPGRKRKHPPVESGDTPKDPAVISKSPSMAQDPGASELLPNGDLEKRSEPQPEEGSPAGGQKGGAPAEGEGAAETLPEASRAVENGCCTPKEGRGAPAEVGKEQKETNIESMKMEGSRGRLRGGLGWESSLRQRPMPRLTFQAGDPYYISKRKRDEWLARWKREAEKKAKVIAGMNAVEENQGPGESQKVEEASPPAVQQPTDPASPTVATTPEPVGSDAGDKNATKAGDDEPEYEDGRGFGIGELVWGKLRGFSWWPGRIVSWWMTGRSRAAEGTRWVMWFGDGKFSVVCVEKLMPLSSFCSAFHQATYNKQPMYRKAIYEVLQVASSRAGKLFPVCHDSDESDTAKAVEVQNKPMIEWALGGFQPSGPKGLEPPEEEKNPYKEVYTDMWVEPEAAAYAPPPPAKKPRKSTAEKPKVKEIIDERTRERLVYEVRQKCRNIEDICISCGSLNVTLEHPLFVGGMCQNCKNCFLECAYQYDDDGYQSYCTICCGGREVLMCGNNNCCRCFCVECVDLLVGPGAAQAAIKEDPWNCYMCGHKGTYGLLRRREDWPSRLQMFFANNHDQEFDPPKVYPPVPAEKRKPIRVLSLFDGIATGLLVLKDLGIQVDRYIASEVCEDSITVGMVRHQGKIMYVGDVRSVTQKHIQEWGPFDLVIGGSPCNDLSIVNPARKGLYEGTGRLFFEFYRLLHDARPKEGDDRPFFWLFENVVAMGVSDKRDISRFLESNPVMIDAKEVSAAHRARYFWGNLPGMNRPLASTVNDKLELQECLEHGRIAKFSKVRTITTRSNSIKQGKDQHFPVFMNEKEDILWCTEMERVFGFPVHYTDVSNMSRLARQRLLGRSWSVPVIRHLFAPLKEYFACV

SEQ ID NO: 810 - protein, 908 aa, Rattus norvegicus
MPSSGPGDTSISSLEREDDRKEGEEQEENRGKEERQEPSATARKVGRPGRKRKHPPVESSDTPKDPAVTTKSQPTAQDSGPSDLLPNGDLEKRSEPQPEEGSPAAGQKGGAPAEGEGTETPPEASRAVENGCCVTKEGRGASAGEGKEQKQTNIESMKMEGSRGRLRGGLGWESSLRQRPMPRLTFQAGDPYYISKRKRDEWLARWKREAEKKAKVIAVMNAVEESQASGESQKVEEASPPAVQQPTDPASPTVATTPEPVGADAGDKNATKAADDEPEYEDGRGFGIGELVWGKLRGFSWWPGRIVSWWMTGRSRAAEGTRWVMWFGDGKFSVVCVEKLMPLSSFCSAFHQATYNKQPMYRKAIYEVLQVASSRAGKLFPACHDSDESDTGKAVEVQNKQMIEWALGGFQPSGPKGLEPPEEEKNPYKEVYTDMWVEPEAAAYAPPPPAKKPRKSTTEKPKVKEIIDERTRERLVYEVRQKCRNIEDICISCGSLNVTLEHPLFIGGMCQNCKNCFLECAYQYDDDGYQSYCTICCGGREVLMCGNNNCCRCFCVECVDLLVGPGAAQAAIKEDPWNCYMCGHKGTYGLLRRREDWPSRLQMFFANNHDQEFDPPKVYPPVPAEKRKPIRVLSLFDGIATGLLVLKDLGIQVDRYIASEVCEDSITVGMVRHQGKIMYVGDVRSVTQKHIQEWGPFDLVIGGSPCNDLSIVNPARKGLYEGTGRLFFEFYRLLHDARPKEGDDRPFFWLFENVVAMGVSDKRDISRFLESNPVMIDAKEVSAAHRARYFWGNLPGMNRPLASTVNDKLELQECLEHGRIAKFSKVRTITTRSNSIKQGKDQHFPVFMNEKEDILWCTEMERVFGFPVHYTDVSNMSRLARQRLLGRSWSVPVIRHLFAPLKEYFACV

SEQ ID NO: 811 - protein, 909 aa, Rhinolophus sinicus
MPSSGPGDTSSSAPEREEDRKEGEEQEEARAKEERQEPSTTARKVGRPGRKRKHPLVESSDTPKDPPVTSKSPSMAQDSGPSELLPNGDLEKRSEPQPEEGSPAGGQKGGAPAEGEGAAETPPEASRAVENGCCTPKDGRGATTEEGKEQKETNIESMKMEGSRGRLRGGLGWESSLRQRPMPRLTFQAGDPYYISKRKRDEWLARWKREAEKKAKVIAVMNAVEENQGSGESQKVEEASPPAVQQPTDPASPTVATTPEPVGADAGDKNATKAADDEPEYEDGRGFGIGELVWGKLRGFSWWPGRIVSWWMTGRSRAAEGTRWVMWFGDGKFSVVCVEKLMPLSSFCSAFHQATYNKQPMYRKAIYEVLQVASSRAGKLFPACHDSDESDTAKAVEVQNKQMIEWALGGFQPSGPKGLEPPEEEKNPYKEVYTDMWVEPEAAAYAPPPPAKKPRKSTTEKPKVKEIIDERTRERLVYEVRQKCRNIEDICISCGSLNVTLEHPLFIGGMCQNCKNCFLECAYQYDDDGYQSYCTICCGGREVLMCGNNNCCRCFCVECVDLLVGPGAAQAAIKEDPWNCYMCGHKGTYGLLRRRDDWPSRLQMFFANNHDQEFDPPKVYPPVPAEKRKPIRVLSLFDGIATGLLVLKDLGIQVDRYIASEVCEDSITVGMVRHQGKIMYVGDVRSVTQKHIQEWGPFDLVIGGSPCNDLSIVNPARKGLYEGTGRLFFEFYRLLHDARPKEGDDRPFFWLFENVVAMGVSDKRDISRFLESNPVMIDAKEVSAAHRARYFWGNLPGMNRPLASTVNDKLELQECLEHGRIAKFSKVRTITTRSNSIKQGKDQHFPVFMNEKEDILWCTEMERVFGFPVHYTDVSNMSRLARQRLLGRSWSVPVIRHLFAPLKEYFACV

SEQ ID NO: 812 - protein, 859 aa, Equus caballus
MVESSDTPKDPTVTSKSPSMAQDSGSSELLPNGDLEKRSEPQPEEGSPAGGQKGGAPAEGEGAAETPTEASRAVENGCCTPKDGRGAPAEEGKEQKETNIESMKMEGSRGRLRGGLGWESSLRQRPMPRLTFQAGDPYYISKRKRDEWLARWKREAEKKAKVIAVMNAVEENQGSGEAQKVEEASPPAVQQPTDPASPTVATTPEPVGADAGDKNVTKAADDEPEYEDGRGFGIGELVWGKLRGFSWWPGRIVSWWMTGRSRAAEGTRWVMWFGDGKFSVWLSLQVCVEKLMPLSSFCSAFHQATYNKQPMYRKAIYEVLQVASSRAGKLFPACHDNDESDTAKAVEVQNKQMIEWALGGFQPSGPKGLEPPEEEKNPYKEVYTDMWVEPEAAAYAPPPPAKKPRKSTTEKPKVKEIIDERTRERLVYEVRQKCRNIEDICISCGSLNVTLEHPLFIGGMCQNCKNCFLECAYQYDDDGYQSYCTICCGGREVLMCGNNNCCRCFCVECVDLLVGPGAAQAAIKEDPWNCYMCGHKGTYGLLRRRDDWPSRLQMFFANNHDQEFDPPKVYPPVPAEKRKPIRVLSLFDGIATGLLVLKDLGIQVDRYIASEVCEDSITVGMVRHQGKIMYVGDVRSVTQKHIQEWGPFDLVIGGSPCNDLSIVNPARKGLYEGTGRLFFEFYRLLHDARPKEGDDRPFFWLFENVVAMGVSDKRDISRFLESNPVMIDAKEVSAAHRARYFWGNLPGMNRPLASTVNDKLELQECLEHGRIAKFSKVRTITTRSNSIKQGKDQHFPVFMNEKEDILWCTEMERVFGFPVHYTDVSNMSRLARQRLLGRSWSVPVIRHLFAPLKEYFACV

SEQ ID NO: 813 - protein, 854 aa, Ovis aries
MVESSDTPKDPALTSKSLSMAQDSGPSELLPNGDLEKRSEPQPEEGSPAGGQKGGAPAEGEGATETPPEASRAVENGCCTPKDGRGAPAEEGKEQKETNIESMKMEGSRGRLRGGLGWESSLRQRPMPRLTFQAGDPYYISKRKRDEWLARWKREAEKKAKVIAVMNAVEENQGSTESQKVEEASPPAVQQPTDPASPTVATTPEPVGADAGDKNATKAADDEPEYEDGRGFGIGELVWGKLRGFSWWPGRIVSWWMTGRSRAAEGTRWVMWFGDGKFSVVCVEKLMPLSSFCSAFHQATYNKQPMYRKAIYEVLQVASSRAGKLFPMCHDSDESDTAKAVEVQNKQMIEWALGGFQPSGPKGLEPPEEEKNPYKEVYTDMWVEPEAAAYAPPPPAKKPRKSTTEKPKVKEIIDERTRERLVYEVRQKCRNIEDICISCGSLNVTLEHPLFIGGMCQNCKNCFLECAYQYDDDGYQSYCTICCGGREVLMCGNNNCCRCFCVECVDLLVGPGAAQAAIKEDPWNCYMCGHKGTYGLLRRRDDWPSRLQMFFANNHDQEFDPPKVYPPVPAEKRKPIRVLSLFDGIATGLLVLKDLGIQVDRYIASEVCEDSITVGMVRHQGKIMYVGDVRSVTQKHIQEWGPFDLVIGGSPCNDLSIVNPARKGLYEGTGRLFFEFYRLLHDARPKEGDDRPFFWLFENVVAMGVSDKRDISRFLESNPVMIDAKEVSAAHRARYFWGNLPGMNRPLASTVNDKLELQECLEHGRIAKFSKVRTITTRSNSIKQGKDQHFPVFMNEKEDILWCTEMERVFGFPVHYTDVSNMSRLARQRLLGRSWSVPVIRHLFAPLKEYFACV

SEQ ID NO: 814 - protein, 888 aa, Bos Taurus
EGEEQEEARAKEERQEPSTTARKVGRPGRKRKHPPVESSDTPKDPAVTSKSLSMAQDSGPSELYPNGDLEKRSEPQPEEGSPAGGQKGGAPAEGEGATETPPEASRAVENGCCTPKDGRGAPAEEGKEQKETNIESMKMEGSRGRLRGGLGWESSLRQRPMPRLTFQAGDPYYISKRKRDEWLARWKREAEKKAKVIAVMNAVEENQGSTESQKVEEASPPAVQQPTDPASPTVATTPEPVGADAGDKNATKAADDEPEYEDGRGFGIGELVWGKLRGFSWWPGRIVSWWMTGRSRAAEGTRWVMWFGDGKFSVVCVEKLMPLSSFCSAFHQATYNKQPMYRKAIYEVLQVASSRAGKLFPMCHDSDESDTAKAVEVQNKQMIEWALGGFQPSGPKGLEPPEEEKNPYKEVYTDMWVEPEAAAYAPPPPAKKPRKSTTEKPKVKEIIDERTRERLVYEVRQKCRNIEDICISCGSLNVTLEHPLFIGGMCQNCKNCFLECAYQYDDDGYQSYCTICCGGREVLMCGNNNCCRCFCVECVDLLVGPGAAQAAIKEDPWNCYMCGHKGTYGLLRRRDDWPSRLQMFFANNHDQEFDPPKVYPPVPAEKRKPIRVLSLFDGIATGLLVLKDLGIQVDRYIASEVCEDSITVGMVRHQGKIMYVGDVRSVTQKHIQEWGPFDLVIGGSPCNDLSIVNPARKGLYEGTGRLFFEFYRLLHDARPKEGDDRPFFWLFENVVVLGVSDKRDISRFLESNPVMIDAKEVSAAHRARYFWGNLPGMNRPLASTVNDKLELQECLEHGRIAKFSKVRTITTRSNSIKQGKDQHFPVFMNEKEDILWCTEMERVFGFPVHYTDVSNMSRLARQRLLGRSWSVPVIRHLFAPLKEYFACV

SEQ ID NO: 815 - protein, 910 aa, Orcinus orca
MPASGPGDASGPAPERGEEERKEGEEQEEARGKEERQEPSTTARKVGRPGRKRKHPPVESSDTPKDPAVTSKSPSMAQDSGPSELLPNGDLEKRSEPQPEEGSPAGGQKGGAPAEGEGAAETPPEASRAVENGCCTPKDGRGAPAEEGKEQKETNIESMKMEGSRGRLRGGLGWESSLRQRPMPRLTFQAGDPYYISKRKRDEWLARWKREAEKKAKVIAVMNAVEENQGSTESQKVEEASPPAVQQPTDPASPTVATTPEPVGADAGDKNAAKAADDEPEYEDGRGFGIGELVWGKLRGFSWWPGRIVSWWMTGRSRAAEGTRWVMWFGDGKFSVVCVEKLMPLSSFCSAFHQATYNKQPMYRKAIYEVLQVASSRAGKLFPMCHDSDESDTAKAVEVQNKQMIEWALGGFQPSGPKGLEPPEEEKNPYKEVYTDMWVEPEAAAYAPPPPAKKPRKSTTEKPKVKEIIDERTRERLVYEVRQKCRNIEDICISCGSLNVTLEHPLFIGGMCQNCKNCFLECAYQYDDDGYQSYCTICCGGREVLMCGNNNCCRCFCVECVDLLVGPGAAQAAIKEDPWNCYMCGHKGTYGLLRRREDWPSRLQMFFANNHDQEFDPPKVYPPVPAEKRKPIRVLSLFDGIATGLLVLKDLGIQVDRYIASEVCEDSITVGMVRHQGKIMYVGDVRSVTQKHIQEWGPFDLVIGGSPCNDLSIVNPARKGLYEGTGRLFFEFYRLLHDARPKEGDDRPFFWLFENVVAMGVSDKRDISRFLESNPVMIDAKEVSAAHRARYFWGNLPGMNRPLASTVNDKLELQECLEHGRIAKFSKVRTITTRSNSIKQGKDQHFPVFMNEKEDILWCTEMERVFGFPVHYTDVSNMSRLARQRLLGRSWSVPVIRHLFAPLKEYFACV

SEQ ID NO: 816 - protein, 909 aa, Ictidomys tridecemlineatus
MPSSGPGDTSSSAPEREEDRKEGEEQEEPRGKEERQEPSATARKVGRPGRKRKHPPVESSDTPKDSAATSKSLSMAQDSGPAELLPNGDLEKRSEPQPEEGSPAGGQKGGAPAEGEGAAESPPEASRAVENGCCAPKEGRGASAEEGKEQKETNIESMKMEGSRGRLRGGLGWESSLRQRPMPRLTFQAGDPYYISKRKRDEWLARWKREAEKKAKVIAVMNAVEENQGSGEAQKVEEASPPAVQQPTDPASPTVATTPEPVGADAGDKNATKSADDEPEYEDGRGFGIGELVWGKLRGFSWWPGRIVSWWMTGRSRAAEGTRWVMWFGDGKFSVVCVEKLMPLSSFCSAFHQATYNKQPMYRKAIYEVLQVASSRAGKLFPACHDSDESDTAKAVEVQNKQMIEWALGGFQPSGPKGLEPPEEEKNPYKEVYTDMWVEPEAAAYAPPPPAKKPRKSTTEKPKVKEIIDERTRERLVYEVRQKCRNIEDICISCGSLNVTLEHPLFIGGMCQNCKNCFLECAYQYDDDGYQSYCTICCGGREVLMCGNNNCCRCFCVECVDLLVGPGAAQAAIKEDPWNCYMCGHKGTYGLLRRRDDWPSRLQMFFANNHDQEFDPPKVYPPVPAEKRKPIRVLSLFDGIATGLLVLKDLGIQVDRYIASEVCEDSITVGMVRHQGKIMYVGDVRSVTQKHIQEWGPFDLVIGGSPCNDLSIVNPARKGLYEGTGRLFFEFYRLLHDARPKEGDDRPFFWLFENVVAMGVSDKRDISRFLESNPVMIDAKEVSAAHRARYFWGNLPGMNRPLASTVNDKLELQECLEHGRIAKFSKVRTITTRSNSIKQGKDQHFPVFMNEKEDILWCTEMERVFGFPVHYTDVSNMSRLARQRLLGRSWSVPVIRHLFAPLKEYFACV

SEQ ID NO: 817 - protein, 691 aa, Monodelphis domestica
  VARIANT 299, 394: Xaa = Any Amino Acid
MNVVEENQGPGEPQKVEEASPPILQQPTDDASPTVATTPEPVGADAGDKNTAKAAADEPEYEDGRDFGIGELVWGKLRGFSWWPGRIVSWWMTGRSRAAEGTRWVMWFGDGKFSVVCVEKLMPLSSFCSAFHQATYNKQPMYRKAIYEVLQVASSRTGKLFPACPENDESDTAKAVELQNKQMIEWALGGFQPSGPKGLEPPEEERNPYKEVYTDMWAPVEPEAAAYAPPPPAKKPRKSTAEKPKIKEIIDERTRERLVYEVRQKCRNIEDICISCGNLNVTLEHPLFIGGMCQNCKNXFLECAYQYDDDGYQSYCTICCGGREVLMCGNNNCCRCFCVECVDLLVGPGAAQAAIKEDPWNCYMCGHKGTYGLLRRRDDWPSCLQMFFANNHDXEFDPPKVYPPVPAEKRKPIRVLSLFDGIATELLVLKDLGIQVDRYIASEVCEDSITVGMVRHQGKIMYVGDVRNVTQKHIQEWGPFDLVIGGSPCNDLSIVNPARKGLYEGTGRFFFEFYHLLHEARPKEGDDRPFFWLFENVVAMGVSDKRDISRFLESNPVMIDAKEVSAAHRARYFWGNLPGMNRPLASTVNDKLELQECLEHGRIAKFSKVRTITTRSNSIKQGKDQHFPVFLNEKEDILWCTEMERVFGFPVHYTDVSNMSRLARQRLLGRSWSVPVIRHLFAPLKEYFACV

SEQ ID NO: 818 - protein, 301 aa, Artificial Sequence
  Synthetic Construct
NHDQEFDPPKVYPPVPAEKRKPIRVLSLFDGIATGLLVLKDLGIQVDRYIASEVCEDSITVGMVRHQGKIMYVGDVRSVTQKHIQEWGPFDLVIGGSPCNDLSIVNPARKGLYEGTGRLFFEFYRLLHDARPKEGDDRPFFWLFENVVAMGVSDKRDISRFLESNPVMIDAKEVSAAHRARYFWGNLPGMNRPLASTVNDKLELQECLEHGRIAKFSKVRTITTRSNSIKQGKDQHFPVFMNEKEDILWCTEMERVFGFPVHYTDVSNMSRLARQRLLGRSWSVPVIRHLFAPLKEYFACV

SEQ ID NO: 819 - protein, 421 aa, Mus musculus
MGSRETPSSCSKTLETLDLETSDSSSPDADSPLEEQWLKSSPALKEDSVDVVLEDCKEPLSPSSPPTGREMIRYEVKVNRRSIEDICLCCGTLQVYTRHPLFEGGLCAPCKDKFLESLFLYDDDGHQSYCTICCSGGTLFICESPDCTRCYCFECVDILVGPGTSERINAMACWVCFLCLPFSRSGLLQRRKRWRHQLKAFHDQEGAGPMEIYKTVSAWKRQPVRVLSLFRNIDKVLKSLGFLESGSGSGGGTLKYVEDVTNVVRRDVEKWGPFDLVYGSTQPLGSSCDRCPGWYMFQFHRILQYALPRQESQRPFFWIFMDNLLLTEDDQETTTRFLQTEAVTLQDVRGRDYQNAMRVWSNIPGLKSKHAPLTPKEEEYLQAQVRSRSKLDAPKVDLLVKNCLLPLREYFKYFSQNSLPL

SEQ ID NO: 820 - protein, 387 aa, Pan paniscus
MAAIPALDPEAEPSMDVILVGSSELSSSVSPRTGRDLIAYEVKANQRNIEDICICCGSLQVHTQHPLFEGGICAPCKDKSLDALFLYDDDGYQSYCSICCSGETLLICGNPDCTRCYCFECVDSLVGPGTSGKVHAMSNWVCYLCLPSSRSGLLQRRRKWRSQLKAFYDRESENPLEMFETVPVWRRQPVRVLSLFEDIKKELTSLGFLESGSDPGQLKHVVDVTDTVRKDVEEWGPFDLVYGATPPLGHTCDRPPSWYLFQFHRLLQYARPKPGSPRPFFWMFVDNLVLNKEDLDVASRFLEMEPVTIPDVHGGSLQNAVRVWSNIPAIRSSRHWALVSEEELSLLAQNKQSSKLAAKWPTKLVKNCFLPLKEYFKYFSTELTSSL

SEQ ID NO: 821 - protein, 422 aa, Rattus norvegicus
MGSRETPSSCSKTHETLNLETPESSSTDPDSPLEEQWPKSAPDLKEEDSMDMVLEDSKEPLTPSSPPTGREVIRYEVNVNQRNIEDICLCCGSLQVYAQHPLFEGGICAPCKDKFLETLFLYDEDGHQSYCTICCSGHTLFICESPDCTRCYCFECVDILVGPGTSERINAMACWVCFLCLPFSRSGLLQRRKKWRHQLKAFHDREGASPVEIYKTVSAWKRQPVRVLSLFGNIDKELKSLGFLESSSGSEGGTLKYVEDVTNVVRREVEKWGPFDLVYGSTQPLGYSCDRCPGWYMFQFHRILQYARPRQDSQQPFFWIFVDNLLLTEDDQETTVRFLQTEAVTLQDVRGRVLQNAMRVWSNIPGLKSKHADLTPKEEQSLQTQVRTRSKLAAQKVDSLVKYCLLPLREYFKYFSQNSLPL

SEQ ID NO: 822 - protein, 410 aa, Rhinolophus sinicus
MAISSPGTLSLEPLDSSDPEPARALDEESWQPPCEIILDLDAECSTDVILVGSSELSCPTSPGRRRDLIAYEVKVNQRDIEDLCICCGSFQVHTQHPLFEGGMCAPCKDKFLDGFFLYDDDGYQSCCSICCAGETLLVCENPDCTRCYCFDCVDALAGPGTAGTVQAMSHWVCFLCLPFSCCGLLRQRPKWRGRLKALYDQESESPLEMYKIVPVWKREPVRVLSLFGDIRKELTSLGFLEDGSGTGRLKHLDDVTNIVRRDVEHWGPFDLVYGCTPHPGQACDRPPGWHLLQFHRILQYARPRQGRSQPFFWMFVDNLLLSKDDRSVATRFLETDPVTIQDAVLVWSNIPAVRSRHSALVPQEELSLLAWDRQRAKSPTPGPAKLVKNCFLPLREYFKYFSVNSLPLYK

SEQ ID NO: 823 - protein, 493 aa, Equus caballus
MNQADGTWLVPQEPGWDVPGYMQPPPDPWAQRHLNPTGIKPWVTPSGQQTQLIKPGWTLSLETLDSWDPDVAGQLDEERWQPSSEIVGRPMAAAPVLDLEEEPSMDIILVDSSELSSPPSPGPSRDMCICCGSFQVHTQHPLFEGGMCAACKDKFLSCLFLYDDDGNQSYCSICCSGETLLICENPDCTRCYCFECVDTLVSPRTSEKVQAMSNWVCFLCLPFPRSGLLQRRRKWRGWLKAFYDQEAVRSRSAWGRRMRSGPHLVGFLWLLVAKCPSALESPLEMYKTVPVWKREPVRVLSLFGDIKKELTTLGFLENGSDPGRLKHLDDVTNTVRRDVEEWGPFDLVYGSTPPLGHACDHPPGWYLFQFHRVLQYARPRPGSPQAFFWMFVDNLVLTEDDRAVATRFLETDPVTIQDVCGRAVRNAVHVWSNIPAVKSRHSALFSQEESFLRAQDRQRAKPPARGPAKLVKNCFLPLREYFKYFSTEFTSSL

SEQ ID NO: 824 - protein, 417 aa, Ovis aries
MALSSPGTLNLETVDGSDPDPALLPDREQWPPPCEIVLDPEAEHSLDIILVGSSELSSPPSPGPRRDFIAYEVKVNQRDIEDVCICCGSLQVHTQHPLFEGGMCAPCKDKFLECLFLYDDDGYQSYCSICCAGETLLICENPDCTRCYCFECVDTLVGPGTSGKVHAMSYWVCFLCLPFPRSGLLQRRRKWRTWLKAFYDREAENPLEMYKTVPVWKREPIRVLSLFGDIKKELTSLGFLEDGSKPGRLKHLDDVTNVVRRDIDEWGPFDLTYGSTPALGHTCDHPPGWYVYQFHRILQYARPLPGSPQPFFWMFVDNLVLTEEDLDVATRFLETDPVTIQDVRGRTVQNAVRVWSNIPAVKSRHSALVSQEELSLLAQDRQRVKPLAQGPATLVKNCFLPLREYFKYFSTELTSSL

SEQ ID NO: 825 - protein, 562 aa, Bos Taurus
MGPGPSGCSKPGEGVSEVSSNSLGSGAGGHGGSVSSGWPGSFGRCLAAALEVSTRAPVEFWTFHCAGSFHSSPLPASNPERPGGGLRNHRRAQSPPAFKSSWERPRLDGIWETLGRQEHGVAEGPSAGGTQTEEVPRRTPGPGLKQDSRIPRLRDGGWWGTFSLSAVSPISWFGVPLSATLVLDPEPEHSLDIILVGSSELSSPPSPGPRRDFIAYEVKVNQRDIEDVCICCGSLQLHTQHPLFEGGMCAPCKDKFLECLFLYDDDGYQSYCSICCAGETLLICENPDCTRCYCFECVDTLVGPGTSGKVHAMSNWVCFLCLPFPRSGLLQRRRKWRTWLKAFYDREAESPLVMYKTVPVWKREPIRVLSLFGDIKKELTSLGFLEDGSKPGRLKHLDDVTNIVRRDIDEWGPFDLTYGSTPTLGHTCDHPPGWYVYQFHRILQYARPLPGSPQPFFWMFVDNLVLTEEDLDVATRFLETDPVTIQDVRGRTVQNAVHVWSNIPAVKSRHSALVSQEELSLLAQDRQRVKSPAQGPATLVKNCFLPLREYFKYFSTELTSSL

SEQ ID NO: 826 - protein, 416 aa, Orcinus orca
MALSSPGTLSLETLDGSDPDPAPLLEGEPCPQPCEIILDREAEHSTDIIPRSSEQSSPPSPRLRRDLIAYEVKVNQRDIEDMCICCGSFRVHMQHPLFEGGMCTPCKDKFLECLFLYDEDGYLSYCSICCAGETLLICESPDCTRCYCFECIDSLVGPGTSGKVQAMSNWVCFLCLPFPHSGLLQRRKKWRGWLKAFCDREAESPLEMYKTVPVWKREPIRVLSLFGDIKKELMSLGFLEHGSEPGKLKHLDDVTNVVRRDVEAWGPFDLAYGSTPPLGHACSQPPAWYLFQFHRILRYARPRPGSPQPCFWMFVDNLVLTQDDRVVATRFLETEPVTIQDVRGCTIRNAVHVWSNVPAVKCRHSALDPQEELSLLARDRQRAKPPTQGPATLVKNCFLPLREYFKYFSTELTSSL

SEQ ID NO: 827 - protein, 491 aa, Ictidomys tridecemlineatus
MRGGGRILGASARRLQLVRWRPSLGQLQVASEAPHPSPYPRRIRPEPTPHTYSQLPTALDLGPGQSPTYWEALWPDLMALSRSGTLTPDSLGSDPDPDRLLDGAQWQQRFLDLEAEHSMDVILVGSSGRSSPSSVQLGRDLIAYEVTVNQRNMEDICLCCGSFQVHTQHPLFEGGICAPCKDRFLEALFQYDEDGYQSSCSICGSGETLLICENPDCTRCYCLECVDTLVGPGTAGRIHAMSSWVCFLCLPFSRSGLLQRRRKWRERLKAFQDREVASPQEIYKTLPAWKREPVRVLSLFGDIGKELTSLGFLEPGSEAGRLRHLEDVTDIVRRDVEEWGPFDLVYGSTPALGHACDHSPGWYLFQFHRLLQYARPRPGSPQAFFWMFVDNLQLTGEEQAIAARFLETEPVILQDVRGSALQNAVRVWTNIPAVKSRHSALASEEELLLLAQDGQRGTLPAQGPSALVKNCFLPLREYFKYFSQNALPLYK

SEQ ID NO: 828 - protein, 346 aa, Monodelphis domestica
MLKSMAHSPPETLSDVILVESETDVVEHLEEDGQQCEIVVVLEEERSTEVISLDSSERSFGSSPRPSKDLIAYEVMVNQRNIEDICICCGSLQIHTQHPLFDGGMCFPCKDNFLESFFLYDEDGYQSFCTICCSGEILLTCENPSCSRCYCFECVDALVNPGSSAKFQAMSNWICFLCLPLISENGLLKKRRKWREHLKDFYDRETHRPLEMYKTVPAWKRKPIQVLSLFGDIETELVKFGFLDNSSDNGMLKYLDDVTDVVRKDVEEWGPFDLIYGSTPAFGQIFKHPPVFQFVQIHEENSSYHSPSLGTEVMNNGCKILHTVKNGWILPIPFIMEMLNVRKVIK

SEQ ID NO: 829 - protein, 215 aa, Artificial Sequence
  Synthetic Construct
MGPMEIYKTVSAWKRQPVRVLSLFRNIDKVLKSLGFLESGSGSGGGTLKYVEDVTNVVRRDVEKWGPFDLVYGSTQPLGSSCDRCPGWYMFQFHRILQYALPRQESQRPFFWIFMDNLLLTEDDQETTTRFLQTEAVTLQDVRGRDYQNAMRVWSNIPGLKSKHAPLTPKEEEYLQAQVRSRSKLDAPKVDLLVKNCLLPLREYFKYFSQNSLPL

SEQ ID NO: 830 - protein, 2176 aa, Arabidopsis thaliana
MEPTDSTNEQLGDTKTAAVKEESRSFLGIDLNEIPTGATLGGGCTAGQDDDGEYEPVEVVRSIHDNPDPAPGAPAEVPEPDRDASCGACGRPESIELVVVCDACERGFHMSCVNDGVEAAPSADWMCSDCRTGGERSKLWPLGVKSKLILDMNASPPSDAEGYGAEETSDSRKHMLASSSCIGNSFDYAMMHSSFSSLGRGHASLEASGLMSRNTKMSMDALGSHNLGFGFPLNLNNSSLPMRFPSLDPSELFLQNLRHFISERHGVLEDGWRVEFRQPLNGYQLCAVYCAPNGKTFSSIQEVACYLGLAINGNYSCMDAEIRNENSLLQERLHTPKRRKTSRWPNNGFPEQKGSSVSAQLRRFPFNGQTMSPFAVKSGTHFQAGGSLSSGNNGCGCEEAKNGCPMQFEDFFVLSLGRIDIRQSYHNVNVIYPIGYKSCWHDKITGSLFTCEVSDGNSGPIFKVTRSPCSKSFIPAGSTVFSCPKIDEMVEQNSDKLSNRRDSTQERDDDASVEILLSEHCPPLGDDILSCLREKSFSKTVNSLRSEVDSSRVDFDKNLSYDQDHGVEIGDIVVEEDSLSDAWKKVSQKLVDACSIVLKQKGTLNFLCKHVDRETSEINWDTMNEKDNVILSLSKFCCSLAPCSVTCGEKDKSEFAAVVDALSRWLDQNRFGLDADFVQEMIEHMPGAESCTNYRTLKSRSSSSVPITVAEGALVVKPKGGENVKDEVFGEISRKAKKPKLNGGHGVRNLHPPPGRPMCLRLPPGLVGDFLQVSEVFWRFHEILGFEEAFSPENLEQELINPVFDGLFLDKPGKDDKRSEINFTDKDSTATKLFSLFDESRQPFPAKNTSASELKEKKAGDSSDFKISDSSRGSCVGALLTRAHISLLQVLICELQSKVAAFVDPNFDSGESRSRRGRKKDDSTLSAKRNKLHMLPVNEFTWPELARRYILSLLSMDGNLESAEIAARESGKVFRCLQGDGGLLCGSLTGVAGMEADSMLLAEAIKKISGSLTSENDVLSVEDDDSDGLDATETNTCSGDIPEWAQVLEPVKKLPTNVGTRIRKCVYEALERNPPEWAKKILEHSISKEIYKGNASGPTKKAVLSLLADIRGGDLVQRSIKGTKKRTYISVSDVIMKKCRAVLRGVAAADEDKVLCTLLGRKLLNSSDNDDDGLLGSPAMVSRPLDFRTIDLRLAAGAYDGSTEAFLEDVLELWSSIRVMYADQPDCVDLVATLSEKFKSLYEAEVVPLVQKLKDYRKLECLSAEMKKEIKDIVVSVNKLPKAPWDEGVCKVCGVDKDDDSVLLCDTCDAEYHTYCLNPPLIRIPDGNWYCPSCVIAKRMAQEALESYKLVRRRKGRKYQGELTRASMELTAHLADVMEEKDYWEFSAEERILLLKLLCDELLSSSLVHQHLEQCAEAIIEMQQKLRSLSSEWKNAKMRQEFLTAKLAKVEPSILKEVGEPHNSSYFADQMGCDPQPQEGVGDGVTRDDETSSTAYLNKNQGKSPLETDTQPGESHVNFGESKISSPETISSPGRHELPIADTSPLVTDNLPEKDTSETLLKSVGRNHETHSPNSNAVELPTAHDASSQASQELQACQQDLSATSNEIQNLQQSIRSIESQLLKQSIRRDFLGTDASGRLYWGCCFPDENPRILVDGSISLQKPVQADLIGSKVPSPFLHTVDHGRLRLSPWTYYETETEISELVQWLHDDDLKERDLRESILWWKRLRYGDVQKEKKQAQNLSAPVFATGLETKAAMSMEKRYGPCIKLEMETLKKRGKKTKVAEREKLCRCECLESILPSMIHCLICHKTFASDDEFEDHTESKCIPYSLATEEGKDISDSSKAKESLKSDYLNVKSSAGKDVAEISNVSELDSGLIRYQEEESISPYHFEEICSKFVTKDCNRDLVKEIGLISSNGIPTFLPSSSTHLNDSVLISAKSNKPDGGDSGDQVIFAGPETNVEGLNSESNMSFDRSVTDSHGGPLDKPSGLGFGFSEQKNKKSSGSGLKSCCVVPQAALKRVTGKALPGFRFLKTNLLDMDVALPEEALRPSKSHPNRRRAWRVFVKSSQSIYELVQATIVVEDMIKTEYLKNEWWYWSSLSAAAKISTLSALSVRIFSLDAAIIYDKPITPSNPIDETKPIISLPDQKSQPVSDSQERSSRVRRSGKKRKEPEGS

SEQ ID NO: 831 - protein, 2183 aa, Arabidopsis lyrata
MELTDSTTEQLGDTRTAALNEENRSFLGIDLNEIPTGPTLGGGCTGGQEDDGEYEPVEVVRSIHDNPDPAPGAPAEVPEPDRDASCAACGRPESMELVVVCDACERGFHLSCVNDGVEAAPSADWMCSDCVTGGERSKLWPLGVKSKLILDMNASPPSDAEGYGGEETSDSRKHMLASSSFMGNSFDYAMMHSNFSSPGRGLASLEASGLIARNTKMSMDALATHNLGFGFPLSLNNSSLPMRFPSLDPSELFLQNLRHFISERHGVLEDGWRVEFKQPLNGYQLCAVYCAPNGKTFSSIQDVACYLGLAVNGNYSCMDADIRNESSLLQERLHMPKRRKTSRWPNNGFPEQKGSSVSAQLRRFPFNGQTMFPFVVKSGTHLQAGDSLNSGNNGCGCEEANNGLPMQYEDFFVLSLGRIDIRQSYHNVNVIYPIGYKSCWHDKITGSLFTCEVSDGTSGPVFKVTRSPCSKSFIPVGSTVFSCPKIDEMVEQNIDKQSDRRDSTLEHDDDANIETLLSDHSPPLGDDILSCLREKNFSKTFNCLRSEVGSSQVESDKVLSYNQDRGVEIGEIVVEEDSLSAAWNKVSQKLVDACSIVMKQKGTFNFLCKHVDRETREINWDTMNEKDNVFLSLSRFCCTLGPHSVTCGEKDKSEIATLVDALSRWLDQNRFGLDADFVQEMIEHMPGAESCTNYRTLKSRSSSSVPVTVAEGALVVKPKGGENVKEEVFGEISRKSKKPKLNGDFGVRNLHPPPGRPMCLRLPPGLVGDFLQVSEVFWRFHEILGFEEAFSSEKLEQELINPVFDGLFLDKPGKDDKRSEMNFTNKDCSGTEFFSLFDESRQPFPAKNTSASVLKETKAEDSSDFAISYSSHGPCVGALLTRTHISLLQVLICELQSKVAAFVDPNFDSGESRSRRGRKKDDSTLSAKRNKLHMLPVNEFTWPELARRYILSLLSMDGNLESAEISARESGKVFRCLQGDGGLLCGSLTGVAGMEADSMLLAEAIKKISGSLTSEHDVLSVEDDDSDGLDATETNTCNGDIPEWAQVLEPVKKLPTNVGTRIRKCVYEALERNPPEWAKKILEHSISKEVYKGNASGPTKKAVLSLLADVRGGDLVQRSVKGTKKRTSIGVSDVIMKKCRAVLRGVAAADEDKVFCTLLGRKLLNSSDNDDDGLLGTPAMVSRPLDFRTIDLRLAAGAYDGSTEAFLEDVLELWSSIRVMYADQPDYVELVATLSEKFKSLYEAEVLPLVQKLMEYRKLECLSAEMKKEIKDIVVSVNKLPKAPWDEGVCKVCGVDKDDDSVLLCDTCDAEYHTYCLNPPLIRIPEGNWYCPSCVIAKRMAQEALESYKLVRRRKGRKYQGQLTRTSMEMTAHLADVMEEKDYWEFSAEERILLLKLLCDELLSSSLVHQHLEQCAEAIIEMQQKLRSLSSEWKNAKMRQEFLTAKLAKVEPSILKEVGEPHNSGHFADQMGCDQRPQEGVGDGVTHDDSSTAYLNKNKGKAPLETDSQPGEFQDSQPGESHVNFESKISSPETISSPGRHEKPIADTSPHVTDNPSFEKYTSETLHKSVGRNHETHSLNSNAVEIPTAHDASSQASQELQACLQDLNATSHEIHNLQQSIRSIESQLLKQSIRRDFLGNDASGRLYWGCCFPDENPRILVDGSISLQKPVQADLMGSKVPSPFLHAVDHGRLRLSPWTYYETETEISELVQWLHDDDLKERDLRESILCWKRLRFGDVQKEKKQAQNLSAPILARGLETKAAMSMEKKYGPCIKLETETLKKRGKKTKVSQREKLCRCECLESILPSMIHCLICHKTFASDDEFEEHTESKCIPYSLATEESKEISDSSKAKESLKSDYLNVKSSAGKAVGEISNVSELDSGLIRYQEEESISPYHFEEICSKFVTKDSNRDLVKEIGLIGSNGIPTFLPASSTHHNDSVLINANPNKLDGGDSGDQVIFAGPETNVEGLNSESNLSFDGSVTDNHGGPLNKLTGLGFGFSEQKNKKSSGSGLKSCCVVPQAALKRITGKALPVFRFLKTNLLDMDVALPEEALRPSKSHPDRRRAWRVFVKSAQSIYELVQATFVVEDMIKTEYLKNEWWYWSSLSAAAKISTLSALSVRIFSLDAAIIYDKPITPSDHNDETKPIISSPDQKSQPVSDSQEKSSRVNRRSGKKRKEPEGS

SEQ ID NO: 832 - protein, 2208 aa, Cucumis sativus
MELADSSDEHPQLNHLPNPTDSTTRSATGTGIGIDLNEIPSPSSFSETLSDSFDVVRTFHDNPPPSDGDPAHVPRGVRGSVCGLCGQPEVRGHVVVCDGCERGFHLACTGMRGGHALNFEDWVCGECFTTGVKSKRWPLGVKSKQLLDINASPPSDGDAYGEDGEELPGIRKHTAVDNSLRGTPFCSSAKYRNLLHSGNGYGHQRAPDTVKNKVKMGLEDVLQQNQVIGRSLDVDLGCPLGSCRSSRGTSVKLSSQNTSEVFLQALREFISERNGVLEEGWCVEIKQSVDSSELYAIYRAPDGKTFGSVYEVACHLGLMSSMQPKARRQGSSHLSGKSYIPKRRKPTKFSVANGFVDNNETLINDRCKGVLCDRQSPSGVTVVNLENSEEAVAEENGGSISSQCYEGFPLQFEDFFVLSLGEIDARPSYHEVTRVYPVGFRSCWHDKVTGSIFINEVLDGGDSGPLFKVRRCPCSAFPIPVGSTVLSKGKSENFSIEQQKEDGLINNSNDDNLQTIFSDVCPPNEDDILSCLGVCSDRDFNVHMQNGLHHEAGSIGKSGDLSDYQYLKDEIGEISVEDTSSSIAWKRMSYDLIKACSELCNQKNTFRLCCNHVGNEQSLLGHCRTRDNSELNSRLAKFCGFPNSAFGQSVVEVENNQSSLPDELEKWLDQDRFGLDMEFVQEILEKIPRIQSCSSYQFVNKRIDSTTLPAVENGVLEVQKFDGEDCKEDEPLNFLFRRFKKTKLAGDGNANYKNPPPGKLLCSRVPPELTGDVYQVWDFLSRFHENLGLKEALSLEELEEDLFNLRGGGVDILQNSENEFKKDPLLNSLNTEFSNDRVSSKFNANGDPHAFIQMETRAMKEVSEVNLASSTDSRCVGAALTKAHTSLLRVLITELQSKVAALVDPNFDSGESKPKRGRKKDADSASSIRKMKLNLLPLNELTWPELAHRFILAVLSMNGNLESAEVTARESGRVFRCLQGDGGVLCGSLTGVAGMEADAFLLAEATKQIFGTLNREKHIITIEEETPDTTGGGCEKVLVTDGNMPEWAQVLEPVRKLPTNVGTRIRRCVYDALERNPPDWAKKILEHSISKEVYKGNASGPTKKAVLSILADICGDSLPPKVEKRRKRITTISISDIVMKQCRTVLRRAAAADDAKVFCNLLGRKLMASSDNDDEGLLGPPGMVSRPLDFRTIDLRLASGSYDGSHEAFLEDVQELWNNLRYAYGDQPDLVELVETLSENFERLYENEVLSLIEKLKEFSKLESLSAETKVEVDGFLVSLNEIPKAPWDEGVCKVCGIDKDDDSVLLCDTCDAEYHTYCLNPPLARIPEGNWYCPSCVMGTRMVEDPSEHTKNHIINLHKGKKFRGEVTRDFLNKLANLAAALEEKEYWEFSVDERLFLLKYLCDELLSSALIRQHLEQCVEALAELQQKLRSCFIEWKNLKCREEVVAARAAKLDTTMLSAVREGQGSCDGARLGASDQYSSLTSLENKCHNHASFQEQMSSAHDVTDNNDAGGNVLSSSGSQNSGKPVKFNEPSLSGLPQEVDGSDQSNMETEISILPSGKQYFTPCDANGVPVAPQVPPPNESQAYHSELDSIKKDILQVQDSIASTELELLKISVRREFLGSDAAGRLYWASVMSNGLPQIISSGSSVHIGSESRDRVVKGRFFKNYTSTSNANSSTLNSNMYSSLLHLPKDFIGNSPCISYQTEADILELIDWLKDSDPKERELKESILQWLKPKLQTSSRSNNQSPEEQLKDSSSSSDVEKLECSGFLVNRASALLESKYGPFLEFVTPDDLNRWLDKARLAEDEKMFRCVCMEPVWPSRYHCLSCHRSFSTDVELEEHDNGQCSSLPASCDGIKEVGDSSKSKCNIKFESKQEESSSMVIAETSRGYFNHSMGLIKYQNDGMMCPYDFELICSKFLTKDSNKDLIKEIGLISSNGVPSFLSSVSPYIMESTLNVIDLKKDSSTPEDGTLLSEWPSLENIILENGCHQSSSIDSSIQKPAGNEISAPKTKRLAAGCLEPKSKKICMDNRFSEFGIGRCFVIPQSSQRPLVGKILQVVRGLKMNLLDMDAALPDEALKPSKLHIERRWAWRAFVKSAGTIYEMVQATIALEDMIRTEYLKNEWWYWSSLSAAAKISTVSSLALRIFSLDAAIIYEKISPNQDSNDYLDTTSSIPEQKLGGVDLTEKPRTSSRKSGKKRKEPEG

SEQ ID NO: 833 - protein, 2240 aa, Vitis vinifera
MMGLGDSSGEYRDSKSETRSVLGIDLNEIPSSSFVEASHDVPDAYAVVRSFHGELSPAAGAAAGLPGEGWGSVCAVCGAPEVGAQVLVCDGCERGFHLVCVGMPGRQAGMLEEWVCGECVRSGVGSKRWPLGSKRRLLDINASPPSEGEGEELPDSRKHSPGDNSFGGNSFGAPETYSNFRCAGNGFGFPKASGILTHAVKLGLEDILHHTNRSFEEVDSGFPLGRLRSSNNTACRLPPQEPSEMLLQALKEFISERHGVLEEGWRVELKQSVRAGELCPVFCAPDGRIFESMSEVAVYLGLTSNCNSVDTEIRSDGSASLKKRSHLSKRRKSTRLSIANSSAENKDALLTDFCKDISSDVQSMELCASNLGNSVKVTEAAPEENGGTGLQQHNNGLPVQFEDFFVLSLGEVDVRPSYHDVNQLWPVGYKSCWHDKLTGSLFMCDVSDGGDSGPIFKVKRCACSAIPLPNGSTVLCRPNLGQSNGQDKEKSNDMISLSMDYDEDGSLQTLLADPSPPMENDILSCIRSSSNGSCCVQTLNSLLLEDNSLHESSGEFLSDHSRLKDEIGEFSLQGRSSSSVWNLVSQKFIDACCETYKRTGSLRFFCEHVKLGASTLPWDIMDESSKGSYTSLDKFCSSPGSVCMPSVIQGENELQTQCEVLAKWLDQDRFGLDVEFVQEMLEQLPGVCACSQYKLLNNRSYHSTLLTVGNGLLLAETENGVQSKGEEALDCLFGGSKRARKYTVGDPLMDDFCPPPGNPLGSRLPPDLVGDVIQVWESLWRFYEILGLKEPFSIEELEEELICPWSDDLNLLEKFGTETQENRDITPTRPSGASGHIPSSSTDSGPEVSTGNPHAFIQMETGQKKEAAQAKLASVTYSRCSGVTLTKAHNSLLKVLVSELQFKVAALVDPNFDSGESKSRRGRKKDADNAIPTKKTKLNMLPINELTWPELARRYILCVLSMDGNLDSAEITIRESGKVFRCLQGDGGVLCDSLTGVAGMQADALLFAEARKQIFGSLNREDDILTIEEKGSDATGDHDRIVVNDGNIPEWAQVLEPVRKLPTNVGTRIRKCIYEALEKDPPEWAKKILAHSISKEVYKGNASGPTKKAVLSVLGIVHDEGLKSKPDKERKRKRVISIPDIIMKQCRITLRRGAAADDAKVFCTLLGSKLINSIDNDDEGLLGTPAMVSRPLDFRTIDLRLAVGAYGGSWETFLEDVRELWNNIHTAYADQPDSVELARTLSQNFESMFEKEVLPLVQKFTEYAKSECLSAETEKEIDDFLVSASEIPKAPWDEGVCKVCGIDKDDDSVLLCDMCDAEYHTYCLNPPLARIPEGNWYCPSCVAGISMVDVSEHTHVIAQRQGKNCQGDFTHAYLESLAHLAAAMEEKEYWELSVDQRTFLFKFLCDELLNTALIRQHLEQCAESSAELQQKLRSISVEWKNLKLKEENLAARAPKVDSGMIYVAGEVGTEGGLSSALTNNGKCIAKPHTLSDRPKDFGILSNDQLQVEGGSEGIRPNGLDKHPSSNCSEGNCTLKPIDNEGQLKEVHAVVDETQVSVDHFPHMVYQGNGSSCRPNELHLQNPLQQEMDGLGTEFNLQVNMCENMEKNDLQGLHHPSDIRIVHVAEHDSELNSIKNDISDLQDSMASIESQLLKLSVRREFLGSDSAGRLYWILAKPGWHPWVLVDGSMALQKKEKMRYLKNPGDSSVQKNSTSLSMDILSTLGGSNASCPFLYRPNASISICSQWVSYQSGEEIDALIGWLKDADPREKELKESILHLHKLRFRDWKLTGDPDQVDSQTTLSRFPNSENAFSDGLLTKAGILLGKKYGPWFEPEIADSSKKWDLRSKVTNESKMYRCECLEPIWSSRHHCPSCHRTFFTDIQLEEHNDGSCRSGPPTSEKSKENSSHLKGKGTMKSKISREESTGDIDMVEIPKGGCSQPRSRLIKFQNEGLVCPYDFEEICSKFVTKNSNKELVQEIGLIGSKGVPSFVSSRPPYISDATLLLVPSGELKATGDMMLAQGNRIPAGGSGSFSDNSSRDSAANETSAASRTDKSALEQKDKKYSLNNNGPEMEVGRCCVIPQSSLRPLVGKVYQILRQLKINLLDMDAALPEEALKPSRADLEKRLAWRAFVKSAETIFEMVQATIMLEDMIKTEYLMNGWWYWSSLSAAAKTSTVSSLALRIYSLDAAIAYEKISSNLDLTDSPKPSSKPDPKPVPNLDTMEKSKLGRKQNKRRKESEG

SEQ ID NO: 834 - protein, 2161 aa, Medicago truncatula
MAELTDSTAAGNNLPPPQQPPQQIDTRSILCIDLNEIPSPSSSFVETLPDFTVDIVRTYHENPAPPPGGPAPLPGGVTSCAVCSKSGAGGLVCDGCERSFHLACAGVRGGRIGAASIGEWVCGECLAGGVKSKRWPLGVKSKQLLDINASPPSDVDGEELHESRKHAMGDQSFAANQFGASVTYSTFNNGSVVGFQRASGAVTRPVRVGFEDILNHTQSMARSFEEVPSQTHGPNELILQALRDFISERHGVLVEGWRVDLRPSMAGSDMYAVYCAPDGKIFDSVYEVANYLGLPSGYNSIESEVRNEMSLSSGGPHLSRKRKSSRTLAANGFAEKQGTFVNSNYKDCSSDGLSMEHVNAQGTALKATEIRRKENGHSDPHQFADELPLQFKDFSVLSLGKVDGRPSYYDVNLIFPVGYKSCWHDKITGSLFTCEVLDGGDSGPIFRIKRCSCSEFPIPDGSTILSMHNRCQFASETNEGQRETNDSMDLDGDESIQMMLLEPCAPTEDDILSCVVSCSSEAYVSEGLRPVVGSIQYNTGYSFSDTMNFCDEIGQILVEERSPFSAWRVISQKLVNACKDICKKNGTFKFYCKHVESEMGLHRWDLRNSESDTHFTSLDKFCGSPGSVSIPDTIYADSDVKDLYELLEKWLEQDRFGLDAEFVQEILEPLLGVQDCLQYERLGSRNNSSSLPTVENGYLVVDCKGQSKYQDEVIQGLYRRPKKARLTEYVKENRCPPPGKPLCSRAPTELIGDIFQVWDLLERFNEILDLKEPLFLEELEKELINPWFNELDFPEKSDRGMGGSSRGGDGDCRLISEACPSGSTGASSYVRCFGASLTKAHSSLLRVLIGELQSKVAALVDPNSEPGEARTRRGRRKDMDSAVPRTKINMLPINELTWPELARRYILAFLSMDGNLESAEITARESGKVFRCLRGDGGLLCGSLPGVVGMEADALLLAEATKKIFGSLSREKDVLILEEEESDANGSSEAQLANDGNIPEWAQVLEPVRKLPTNVGTRIRRCVHAALEKNPPDWAREILEHSVSKTVYKGNASGPTKKAVVALLDDVTGGVQQNPNKGRKKKFFISISDIIMKQCRIVLRRAAALDDSKVFCNLLGRKLTNSSDNDDEGLLGTPAMVARPLDFRTIDLRLASGAYGGSHEAFLEDVRELWSNVRVAFGDQPDLVELSEKLSQNFESLYNEEVVTYVQKFTDYAEVGCINAEMKKEVQAFIASSNEIPKAPWDEGVCKICGIDRDDDSVLLCDTCDAEYHKYCLNPPLARIPEGNWYCPSCIGGKHATQDLTERAQLTGKRRSKKFQGQVNCLYLDALTHLSSVIEEKEYWEYSVGERTLLLKFLCDELLNSSLIRQQLEQCSELSAELNQKLRGLSVEWKNLKIKEDVLSTKAAKFGTLSQCTTGEVGLKEGFTSLFSNTSKCLVKPHATTTNPSGLGVFDDSLPSEEIPKEKCRFNSVDKSISVTHSNSDSQNMNSIGQLKTVPVAVEFQCTDKSPKSFPFSNHMPQEINGYSEGQCVPVEVSQNAVNESEPYHLELNAVKRNISLLHESINSVGSQLLKLPVRRELLGIDSIGRLYWALATLRGRSRIVVDASAVVQHGRGLSVSKDSGEKLSALQHCKLSEKDNYKMLGLMKDCSPLMSQPLNALANSSPWIVYETDSEIEELLGWLDDYDPKEKELRDSIMLGPKYRSQEFINAHTEGQVEDQGPVYLPRNTAPNSLVTKATSLLEKNYGPFFDLDTAEGLKNQNKKARTTNDEKLYRCECLEPIWPSRKHCLYCHKTFLSDVEFEGHNGGKCKAGLMALGRNKDKNGSSKGRKNLKCDTSHEKSRADTETDGTSINGCSSLNSRLTKFSNENPSCPFNFEDTCAKFVTNDSNKELVREIGLIGSDGAPSFVPSVSPFVSDYTQALTIKDVGVVGGASKASESQVSQENTDGAGTCHDHKSGKSTESLAANRSNKAGNSNKSSLGEQRDGKLSICSPASDKGVDGCCVVPLSSLRPLVGKISHILKQLKINLLDMDAALPKVALRPSKAQLDRRQAWRAFVKSAMTIYEMIQAIITLEDMIKTEFLKNDWWYWSSFSAAAKSSTLPSLALRIYSLDSAIMYEKMPNSSLAESSDPPAVAEPKPVITVDADKSKGSRKSNRKRKELDG

SEQ ID NO: 835 - protein, 2208 aa, Ricinus communis
MELTDSSDITTRSPLFIDLNEIPSSSTSSPPSIARPDPESNKRPKPDEFDSLDVVRSFHENQDPATGIAAGLPEEEKLLVCGACGKPEAREKDEVVVCDGCERGFHLLCAGMHGKEEVMKFLDWICGDCVNNGIKSKRWPLGVNKSKKMILDINASPPSDCDGDGDGDEERAYLRKHALGDNSFSGNTFGAPVAYSNRLYVGNGFGPFDFRKASGLMMKAFKVGVEDILHHAQTVDRSLEEIDLGFPLGRFRSSNSTANKLPSRSPNEILLQGLREFISERHGILDEGWHVELKNSVSGCEVFVAYCSPDGKTFGSMAEVACYLGLTPSTRSDGSPSLQERLHLPKKRKTKRFSLANGYAETKQALINGYHKGLLSNGQSIEIGDSKFGKVTEANMEEEDIAKSLPSDEGLPLQFEDFFVISLGKIDGRPSYHGPQLIWPVGYRSCWHDRVTGSLFICEVLDGGDSGPIFKVRRFSCSSIPIPVGSTILYRRNPYQFAGQNSKEYNDVINYDMDRDNDGSIEMILADSSPPTEDDIMTCLSYTSKKVCDVRTSDCLQRSSLHNRCGDLSSYNLGSSTWDIEDKRSIISFASLAKFCSSPSLVGIPFEYQVEVDNLATALSKWLDQDRFGLDTDFVQEVIEQLPGVDACSKYEFLANRSNYSVSLTVGNGLLSAKRKDAAELDESFQRCKKPRLGKDHETDDRYLPPGRLLCSKIPPILVGDLYQVWELLWRFHEILGLEEPWSLRELEEELVNPWFDCASLSKNLQRKVSGSQVIHIDKADGTSGPISSPCQEPLKAVSEDTTHVFIQVEKGGTNESVQYGFASGTQSKCCDVTLTEVHGSLLSVLIRELQAKVAVLVDPNFDSGELKSKRGRKKDVDSSTLIRRSKCNTLPINALTWPELARRYILAVLSMEGNLDSTEITARESGKVFRCLQGDGGVLCGSLSGVAGMEADALLLAEATRQIYGSLMRENDVLIIEDEVTDASDSCEKNSVKDGNIPEWAQMLEPVRKLPTNVGTRIRKCVYLALEKCPPEWAKKRLENSISKEVYKGNASGPTKKAVLSVLADVLGEGLSQKSNNRNKRKITVPVSDIIMKQCRIILRHAAAADDAKVFCTLLGRNLINSCDHDDEGLLGYPAMVSRPLDFRTIDLRLAVGAYGGSHESFLEDVRELWNNVRTAFRDQPDVIELVETLAQNFESLYEKEVVTLVQKFEEFAKLDRLSAETKKDLDIVLASTNEIPKAPWDEGVCKVCGFDKDDDSVLLCDTCDAEYHTYCLNPPLARIPEGNWYCPSCVSVRMVQEASVSTQVIGQNSCKKYQGEMTRIYLETLVHLASAMEEKDYWDFGVDERTFLLKFLCDELLNSALVRQHLEQCMESTAEVQQKLRTLYAEWKNLKSKEEFMALKSAKMGTGASGEVKEGLVSALKDQGKSVGQPPVLGDKPSDCCAPSDDVSAVDGSPEGNGINGFDKHPSEINYEKKPSHDSQNIDSTNNHGPVKDMHDAMEGSNDPSKENSKPLGPSQLPLSNHSTEIDQMDEAPCEGSLQTYMERDSSTLQPPSDHPGFSLSSDMNALVVLNLPSVTMNESQAYHTDVSAIKDDILRLQNLISSMESQLSKQSLRREFLGSDSRGHLYWASATPNGHPQIVVDRSLTFQHRKISHHRLGNSSVLQHSSSSGIDACLNLEGSRACFPFLFNPNGTLSMSSAWVSYETDAEIEELIGWLGNNNQKEIELKESIMQWLKLRFQESQRIRDPVQEECRAGLSTIRNNDQTAFSNCLTKATLLLEKNYGAFVELDTSDMLKKRGKKARGTNEEKTYRCDCLELIWPSRNHCYSCHRTSSNDVEFEGHSDGRCSSVPQSREKSEETNDSLKGRGNVKAEVTWKEKKSEIDKLHSSMGGLSELRARLIKFQNEGINCPYDLLDICSKFVTEDSNKELVQDIGLIGSNGIPPFVTSISPYLSDSISVLISPENNTRIPGDECNVDERQVFPQGNWNENRAVLQSSSDNSTRKTSINEIGEVLKTNKPPLGCLQRRGKKSSLGKCFPEMGPGCCCVVPESSLMPLVGKVSSILRQLKINLLDMEAALPEEALRPAKGQLGRRWAWRAYVKSAESIYQMVRATIMLEEMIKTEYLRNEWWYWSSLSAAAKTSTVASLALRIYSLDACIVYEKNSNSDPSVNLKLSSLVNQKPVNDMDLVEKCRVTRKSNKKRKEPEG

SEQ ID NO: 836 - protein, 2202 aa, Glycine max
MIMELSDSTGGDRNLNAPPPLPPPHNNHNQDARSGLGIDLNEIPSPSSSFPETLPGSVTVDVVRSYHDNPAPPPGGPAALPRSGSSPCAACAKPSPAAGSHHQLVVCDGCERGFHLACAGIRGGGRQAASLDEWVCGECVAAGVKSKRWPLGVKQLLDINAPPPSDAEGDGGDDEVQVSRKHALGDNSFAANPFGALVTNSNFNNGNANGFEKASEVVTHAVRVGFEDILNHTQSITRSFEEALRDFVSERRGVLEEGWRVEFRQSVSNSELYAVYCAPDGKIFDSVYEVACYLGLTSGYNSIESELRSERSLPSLGGPPSRKRKSTRTTVANGSMENRGTSTNSNCKDPPCDGLNVECASARGNIPKPSEIGRKEDCHSCSQQSADGLPLQFKDFFVLSLGKVDGRPSYYDVNLIYPVGYKSCWHDKITGSLFTCEVLEGGDSGPIFRIRRCSCSEFPVPVGSTILSMSKLCQVVSQTNEGERKTNANMDLDYDEGLQMMLLDSCLPTENDILSCFPSCSIESRDMSDVLHPITSSVQDNASNSLADNLGFNGLGEILVEERSSFSAWRVISQKLVNACKDILKLKGTLKFYCNHVDKWDLRNGKSDTYCTSLDKFCGSLGSVGIPDVIYSDNDLEGIYVALGKWLEQDRFGLDVEFVQEVLEQLPSVQDSLQYELLNNRNNSSSLPTVENGFLVVEWRDGSKYQEEAVQALYGRSKKVTEKSIKESCHPPLGKPLCSRAPGELIGDIFQAWELLKRFHEILDLKEPLTLDELEKELINPWFDGSNFLEKSERDMDESQVFISLGADGNGRPLLSPRCEVDPSVSIESSHAFIHVETEAMKETAQVKLASFTYARCFGVALTKAHKSLLRVLIGELLSKVAALVDPNSEPGESRTRRGRRKDMDSAVPAKRTKLNMLPINELTWPELARRYMLAFLSMDGNLESAEITARESAKVFRCLRGDGGLLCGSLTGVAGMEADAQLLAEATKTIFGSLSRENDILTMEEEESNAKGAPEIFLANDGNVPEWAQMLEPVRKLPTNVGTRIRKCVYEALEKNPPEWAREILEHSISKEVYKGNASGPTKKAVLSVLVKVGGEGLQSNPNKSQKKKIVISISDIIMKQCRIVLRRAAAADDSKVFCNLLGRKLINSSDNDDEGLLGSPAMVARPLDFRTIDLRLATGAYGGSHEAFLEDVRELWNNVRVAFGDQPDLVELAEKLTQNFESLYNEEVVTYVQRFVEYAKLECLSAEMRKEVGDFIESTNEIPKAPWDEGVCKVCGIDRDDDSVLLCDTCDAEYHTYCLNPPLARIPEGNWYCPSCVVGKHATQNVTERTQVIGKRQSKKFQGEVNSLYLESLAHLSAAIEEKEYWEYSVGERTFLLKFLCDELLNSSLIHQHLEQCAELSAELHQKLRAHSAEWKSLKTREDILSTKAAKIDTFSLNTAGEVGLKEGFASLLSNTGKCLVQPHTAVDNPSNFGVFVDSLPSEEVTKDKYRFDSVDKSISVTNSDSDSQNMNSIDVEGQFRNVSGAVESQCTDKSPKSFPLPNHMPQETNGAGGASLVQGKNQKCEGKDIPTPVSYQQGMPVDVPQISVNESEPYHLELIAIKRDISLLQDSITSVASQLLKLSVRRECLGIDSIGRLYWASALPGGRSRIVVDASAALLHGRGMTFSRDYVEKFSVLQHCALSDKDSSLMSQPSNPLGNSSPWIAYETDVEIEELLGWLDDSDPKERELKDSIMLGPKSRFQQFINAQTEDRAKDQGNVSMPRNREKTVSNSLVTKATSLLEKKFGPFVEWDNSEVLKKQNRKTRTTNDEKLYRCECLEPILPSRKHCTHCHKTVASDIEFDGHNDGKCNAGLLAIEKNKDKNGSSKGRGNLKCDTLHEKFRADAETALTSVSGSSKLSSRLIKFSNEESTCPFNFEDICSKFVTNDSNKELVSEIGLIGSDGIPSFVPSVSPFVSEYTLSAQKDESIVGGVSIVSESRVSQGNTDGAGTCLDHKSGISTGKLAANESNKSNKSSLREQRDGKFSFCSPASVMGADGCCVVPSPSLRPLVGKASHILRQLKINLLDMDAALLAIALRPSKAVPDRRQAWRTFVKSAKTIYEMIQATFTLEDMIKTEYLRNDWWYWSSFSAAAKSSTLPSLALRIYSLDLAIIYEKMPNSSFTDSSEPSVIAEPKPLMNVDTEKSKASRKSTRKRKESDS

SEQ ID NO: 837 - protein, 556 aa, Zea mays; identical to SEQ ID NO: 688

SEQ ID NO: 838 - protein, 1852 aa, Sorghum Bicolor
MQFMPAFDLAQCLGMRQNLTSMDRDLNADGNVPQRSVNLRRRRDLPQTSTLPKVADNHELGSAGISMDPSFFNNAIEQSPSENRSSLKPPKFLMENSNHQPHHHTVALPVQCSDFFITSLGEIDNRTSYHNSYQIWPVGFTSYWHDRVTGSLFECEVIDGGNFGPLFKMRRLPCSAFQLPDASTTVCPNVVRKADTIETREGSGSIEDTTNDADDNISMLLSDFSDTNQDFLSCLGNDMEGKESLGCSNVQTSSMTVPAVLSDLGSLSLAPTNDANMYDKIGDFSYEGTSPSSVWRMVCCAMMEACEKMYKEHGHLVLFCTHSSEKSSFDYGSGRQRTDSPFDLFAKFCSSNGPKVPRFIEKENDVESTCALLKEWLYPDRIGFDMEFVQEFVESLPKSRACSNYQFLCNRTGINSSLTIASGTLIAVNKNSPSHGDVMSYGRHGSVVSGPQDHAQPSSFSIRELPPGNPISCKLPPELAGDVLQILEFLGRFAEIIGLKELPSIEQVEDELIDPWPIHVNENGTQNYRDHTPPMNSPANVSTSYSNGESGITIEEMVSVFIPIETSSAREAAQNKLAAQTLGRCSGLVLPEIHLALLKVLFTELVSRVAIFVDPKFDLKESKSRRGRKRDTDTLARELKIDMLTANNLTWPELARRYILAVSSMSGCMDLSDISSREGVKLFRCLQGDGGVLCGALPGVVGMEKDASLLAEAETLICKSSANEGNKVFMMDYKDADIVDSPEEPASDTTLPDWVKSLEPVRKLPTNVGTRIRKCVYEALEREPPEWARKILEHSISKEVYKGNASGPTKKAVLSVLTEACRTKVPQNTEKPRKERNIISISEAILKRCRIALRRAISSDESKQFANLLGTTLTNSNENEDEGILGFPGMVSRPLDFRTIDIRLAKGAYRGSWEAFLDDVQEVIRNLQTAFADRPEVVVMVAALSESFESLYKAEVQDLVEKFDKYLSNENGNSEIHQELQDALTTANNKLPKAPWEDGVCKVCGIDRDDESVLLCDTCDSEYHTYCLNPPLARIPLGNWYCPSCTAQTHVSVQEQKKCLGEEAHVFIEKLNKLAVAMDEKEYWELSVAERIYLLKFLCDELHNTALIREHLDQCSDRSNDLQQKLRHLNYELKELKYRVETKTSYATQSRWMKNDQIGNSSGLVENQQRAMPTASEHLEEAEQVNVGVNLSNPAEGVPAGQLNVGKPCSTDNGISSTSVIEGSKSLGLSKQPSEIVTDRTDRDSIGEGSKRFEKSLGGKSGTCDNLNVGETHSATVIIAPIGDLPDENARASSQDNMETSTSKLVDHDADNNESNNLLERISQLQDSISTVESQLSMASLRRDCLGRDSVGRLYWVTGRPSKRPRLVADGSMLIPKDRDISMVTSHSQSTFDKGWNSASLVMYESDEEIKSLVDWLRDIDPREKDLKDSILHWQKSLYHQASFPITDPPVSKSSKSEPPMELPNTKAFIVLEQKYGPQLDQDTSELSKRRGSKSKSGSEERVYRCDCLEPLLPFRHHCLNCHETYLTLTEYEGHNGVKCNSSNDCPTESKENDEPKLKGTKDPVDHNCSIEPSNSGKLESCPYDFEEICRKFITNDSNKETVKEIGLLGSNGIPSFVPSPAYFLDPPALLNENKRNDDKPNDWTSSLEECQAMSAKMSGPEGSQVGQDFSGNAGDGQMPKSKKPVRDGTSAKEAPSTDKPTRLLTVNGGLVPESSLMPVIGRNFHILKQLKINLLDVEAALPEEAFRASKSQQIRRRSWRAFVKDAELVSYVVLAINFLQSMIKAEFLKKDWWYWSSFTAAIKTTTVSSLALRIYTLDDCIMYTKDPSLNPEPADNARSGNKGKRKKDADS

SEQ ID NO: 839 - protein, 1949 aa, Oryza sativa
MPTPSQTIVFGSITGLVKEKEDSYLEFSWWFREDFGGVNGLLLCSSGALHLGTNAADGAHLTEFAVQLPHFEGLHLKNTALYDGNQFMPAFGLAHCLSMRQQFTSMDRDIMADGNIVQRSIHLRRKRRDLPQTSSLPKFAENHELGSANIFMDPSFYTKATESSSTENKSSSKPPKFLGENSSRRPHHRTVGLPVQYSDFFITSLGEIDKRPSYHNSYQIWPVGFTSYWHDRITGSLFECEVCDGGNFGPLFKVRRISCSVFPLPDASTILSQNSTRKAETIETNENNTLLEDTANDTDDNILMLLSDSSETNQDLLSCFSNDMESKMTSLGCNDLHSSNRSVPTVPSHSGTDKIGEFTFEGTSPSSVWRMISCAMMEACEKMYKEHGHLVFFCTHGTEKHSFDSGSGFQDFNGPYTPLTRFCSSYGPSIPRIVEKENDVEPTYSLLKEWLYQDRIGFDLEFVQEIVESLPRSRACSNYQFLCNRAEFVSSLTVASGSLRVVHKNGQSNGDVMSYGRHGSVVTGLQDHTQPSGFRIRELPLGRPISNKLPPELAGEVLQIWEFLGRFSEIIGLKEIPSYEQLEDELIDPWPICADQKEKLSNDIHRDHTSPINSPANVSTSYSNGESGLTSNEEIVSLFIPVETSSMKKAAQDKSAAQTLGRCSGVVLPGVHLTLFRVLFGELLSKVAIFVDPNIDPKESKTRRGRKKDTENLISAKEFKFDMLTANKLTWPELARRYILAISSISGCMDLSDISSREGVKLFRCLQGDGGILCGALPGVAGMEKDALLLVEAENLICKSSVNEESKVFMMDQKDTDMVDSPEVSATDNKTLPDWAKSLEPVRKLPTNVGTRIRKCVYESLERKPPEWARKILEHSISKEVYKGNASGPTKKAVLSVLTEACRVKVPHNPEKPRKERNAISISEAILKKCRIALRSAISSDESKLFGNLLGTTLVNSNENEDEGILGFPGMVSRPLDFRTIDIRLAMGAYYGSWEAFLEDVQEVIRNLHTAFGDRPDVLEMVVALSQSFESLYKTEVLDLVEKFDKYLSDKNAGSEMHEELHDILTAANSLPKAPWEDGVCKVCGIDRDDDSVLLCDKCDSEYHTYCLNPPLARIPEGNWYCPSCMLGQTKAHHDQGVQDVKRQQKKFVGEEAHAFQEELNKLATAMEEKEYWDLNMQERIYLLKFLCDEMLNTALIREHLDQCSDKLGDLQQKFRASNFELKDLKYKEEMRTSYARQSRSSKTEQHFNNSSGPVENQQQCTPTALDHLEEAEQGNVGVNLNNPADGVPDGQLNVGKPYKSDKDISSASMVEERKSSGLSEQPSGMAIDQIDGDAIDEGSQSCEKRSLGAKSSTCDNLNLKDTEFSTPGRELPDERASTSFQDNLEASSTKSIELDADNNEMDTLSDDISKLQDSISLLESQINMASSRRECLGKDSIGRLYWVIGRPGKRPWLVADGSMLKPKERDISMVNSYPPSAFDCKGWNSASIFIYESDEEIQCLLDWLRDYDPREKELKDSILQWQRHFCHQSSSPLVDPPISGPKGEQLMELPNTKAAVILEQKYGLQLDQDTSDLPKKRGKKIKLSSEDRTYRCDCLEPVWPSRYHCLTCHETYLISTEFEGHNDGKCSKIHQSPDESRENDEPKVKVTKSDTKEKDSLECSSVIEPSSDRKLMQCPYDFEEICRKFVTNDSNKETVKQIGLNGSNGVPSFVPSPAFFLEPAIVQSQNRKDDELKDWTSSLEECNAMSAQKLVQEVSKSGQSCPGNVGDEKVQKSKKPTPDNTSGEEAHSTTGKPTRLLAVNGGLVPESSLRPLIGRNSHILKQQKINLLDIEAALPEEALRASKCQQIRRRSWRAFVKDAESISQMVLAANLLEGMIKAEFLKNDWWYWSSFTAAMKTSTVSSLALRVYTLDDCIIYSKDQVPSVEPADNTRSGNRGGRRRRELESLAS

SEQ ID NO: 840 - protein, 2101 aa, Brachypodium distachyon
MDRPPHLDIDLNEEPSPPPSPPPPPVPLLPPPREVPPPIFALPPTPPPPPPPPLPLWPVPAAIAQEQLRFMHEREARELAVMYHQAELARAAAGRAIAVPPFPHPGPGEAGWGNPPGPCAVCGKPETPWETIICDACDRAFHQSCVRVWGPPVGTQPLPPPPPATPGVRRPAVTMNEDWMCPQCERNGKRSERWKLGPVRLDINAAPPPWTEDAAPTHWTEGPVLTRGIDPDGAHLTELPHFEGLHLKNTTLYDANQFMPAFGFSMRQPLASTDRDFVADGNVAQSSNHIRRRRRDFPQASTFPMFAEKHEFGSANIFMDPSVFTKATEPSPSEDRNAPMAPKFLLESNNRRLNHCTVGLPVQYQDFFITSLGEIDKRASYHNQHQIWPVGFTSYWHDRVTGSLFECEVQDGGSFGPLFKVRRLPCSVFPLPEASTILSQNGARKADTSETKESSSFIGDAAYYMDDNISSLLSDPSETNQYYLSFLANDMVGKRTSLNCNDGHSSNMTAPILPSHSDNVSLAPSKEANIHDRIGDFTFEGTSSSSVWRMISCAMMEACEKMYKEHGHLMFLCSHSSENHSLNKGSGCQNFDGPCAPLTRFCSSNGPTIPRLIEKKNDVESSCTLLKEWLYQDRIGLDLDFVQEILESLPGSLACLNYQFLCDRAKSVSCVTVASGSLVAVHKDGQSNGDTMSYGRHGSAVTGLQDHVQPSGSSIRELPPGHLISCKLSPELAGDVFQIWEFLGRFAEIIGLKEVPSYEQLEDELIDPWPICANQNELLSNAETGLTNNEEIVSVFIPVETSSMKEADQDKLAAQTLGRYSGVVLPGVHLTLFKVLFGELLSKVAIFVDPNIDPKESKPRRGRKRDTESLNSAKELNFDMLTANKLTWPELARRYLLAVSSISGCMDLSDISSREGVKLFRCLQGDGGILCGALPGVAGMEKDASLLVEAESLICNSSSNEGNKVFMMDYKDTDMIDSAEVPVADNKKLPDWAEPLEPVRKLPTNVGTRIRKCVYEALERKPPEWARKILEQSISKEVYKGNASGPTKKAVLSVLAQACRVIVPQNPENSRKEKKSISISDAILRKCRIALRRAISSDESKFFGNLLGTTLMNSNENEDEGILGFPGMVSRPLDFRTIDIRLAVGAYCGSWETFHEDVQEVIRNLHTAFGDRPDVLDMVVSLSQGFESLYKTEVLDIVQKFDFYLSNGNAGSEIHDELHDILSAATNLPKAPWEDGVCKVCGIDRDDDSVLLCDKCDSEYHTYCLNPPLARIPQGNWYCPSCMSGQKKSHLDQGVKDLKRQQKKHVGEEFHAFHEVLSKLAAAMEEKEYWELSIYERIDLLKFLCDEMLNTALIREHLDQCPDKLSDLQQKFRALNFELKDLKHKEEIRTSYARQSRISKIEQHLSNSSGLVQNKQNDVPTVSGHLEEAEVNLNRPAEGAPPGQLNVDKPCSSGNDMSTIEEYKSLGHSGQPSETVSDWIEGGTIDERSQSCEKRLLDGTISTCENLNLRGTPIAERAPVAPPLIPGGELPDENASTSFQDNLKTSSARSLERDADNDEMDSLSDDVSKLQDSVSIVESQLNMASLRRDCLGKDSLGRLYWVLGRPGKRPLLIADGSMLIRKERNISMVNNYDASLFHKGWNSASIFIYESDEEIRYLVDWLKDYDPRDKELKDAILQWQRHHNHQGGYLRDPPVSILSKNEQLMDLPSTKAAVVLEQKYGLQLDQDTSNLSRRRGRKTNIGSEERTYRCDCLEPVWPSRHHCLTCHETYFTSSEYEGHNSGKCNRNSHSPSESKENDELKVKSAKSDIKEKDSLDRSSAIESSSSRKLNSCPYDFEEICRKFVTNDSNKEIVKDIGLIGSNGVPSFVPSPAFFLEPAIILNKDKKDVPDDWTSSLEECQSMSAQQLGQEESKSGQNCPDNTCDENVPKSRKPTPDSTCEASSSVTHKPTSLLAVNGGLVPESSLRPVVGKNSHILKQQKINLLDIDAALPEEALRASKSQQIKRRSWRTFVKDAESICEMVLATSLLESMIRTEFLKNDWWYWSSFTVAMKTSTVSSLALRIYTLDDCIIYAKDPNVEPADNTKVINRGKRRKEPEPSAS

SEQ ID NO: 841 - protein, 2184 aa, Populus trichocarpa
MKLTTDSSDITSRSPLGIDLNEIPSTSTSSPPENSLDVVLSFHENPDPAPGMAAGLRAEGSMCGACGKPEVRGQVVVCDGCERGFHLGCAGRQAINSAEWLCGECLSGGVKSKRWPLGVKRILDINASPPSDAEDELLSNLRKHTQSQGDNSFGAPPLTYSNLFYTGYGLLSDVMRPMQTADTSAEGAGMSFPQGSLRSRNNTTIRLLSRNPSEIFLQGLREFISERHGVLEEGWSVEFKHSISNYDLYAVYCSPDGKTFHSMSEVACHLGLMPNRNSIDTDSTSYVSPSPQETLHLPRKSKSKRCSLTNVFSEHKTTLVSGYCKELFSNGQSIEINNANLGEVRESEMQGDGISDFQPSNEGLPVQFEDFFVLSLGKIDVRPTYHNASLIWPVGYRSCWHDKITGSIFLCEVSDGGDSGPVFKVRRVSCSLLPVPQGLTVLCRTNFGQYSSHNNQDCHHMIFHNIDCESDDNIELILADPAPPSYDDVLTCLQGSSNRTSEIMQTSSFDSRSENFLFSDKVLGEEIGEISVEERSSTSAWTVISQKLVDAYSEIHRQRGTLKVSCNHADNEMGSPGLYTKNENSNASSASLAKFCSCPNFVGIPLECQGELEAFSSTLSEWLDQDRFGLDTEFVQEMIEQLPGAKACLKYEFLINRGHYSVSPTVGNGFLMAKRKSRSESDALFQRSKKARLAKEILGDYQYPAGRPLCSRLPPVLVGDFYQVLELLWRFHEILGLKEPLSLEELEEELINPWSNLSHLLKNLENKVHGSEAIDFYEADSMSGLNSFLPDKSGMTVCEGNSHACVNDEGCRMGVKDGGQATVASVTHISRSGVASTNAHCSLLGMLISELQCKIAPLVDPNFDSGETKSKRGRRKDADSSAPTRRNNLNMLPINELTWPELARRYILAVLTMDGNLESAEITGREMGRVFRCIQGDGGVLCGALTGVAGMEADALFLAEATKKVFGSLSRKKDFLSIEDETADTSCDHENNNMKDGNIPEWAQVLEPVRKLPTNVGARIRKCVYDALEKCPPEWAKTRLEHSISKEVYKGNASGPTKKAVLSVLADVLTGVQQKAVKTNKKKISIPISDIIMKQCRIVLREAAAADDAKVFCTLLGRNLRNSCDTDDEGLLGSPAMVSRPLDFRTIDLRLAAGAYGGSHESFLEDVRELWSHVRMAFREQGDLVELAETLSQNFESLFEKEVVTLVKKFEGYAKLDHISAEIKKELDDFLASIHEVPKAPWDEGVCKVCGVDKDDNSVLLCDTCDAEYHTYCLNPPLARIPEGNWYCPSCVVSKHVVQEASGISQVIGIVHCKKYQGEITHVYLEKLSHLSVTMKEKEYWEFSVDERIYLLKFLCDELLNSGLIRQNLEQCAETTNELQQKLRAFSMEWKTMKSKEEFLASRAADMDGSAVGEVGLKEALASAIPNQPKQAGQQPDVSDGPSHCSSFGHDVPALNGGQDGTRINGFDKYPSVSSSGKNHSCNSQTVNHTDTKEQVNDPLAVVDGSKLPSRENEKSSGPNNLSQIIGDMDEIQFQGNLQGYAGRGTSLLPPPDVGFGTALEENSRVSQHVPPVAINESEGFNLELSAVKNDLLHLQNSISRIQSQLLKLSVRREFLGSDSRGRLYWASTGRGSDQRVIVDGSLTLQQRNSDQFGTRLNLEEQKTFFPFQCTSNNVLAMCSPCVSYETEEEIEQLISWLKDDVQKERELKESISQCLKQRFQETRQARDLVQEEHQALSVITNNNNTAFANYLVTKAAMFLEKKYGPLVELHTSDKLVKRARVTGEGKMYRCDCLEPILPSRHHCLSCHRTFSDDIEFNEHNGGRCNLITPANAKSEYISGFVKVKGNMKSQTTQKVPISEMDVVETSRSGSSGLGSRLIKSQNEGICPYDFSEISSKFVTEDSNKELVHKIGLIGSNGVPSFITSLSSDLNHSMSMLICHGENNGVVGDELSIDGRMVVSKGKKSESSAALDNIYDNSSWKSVANEISKVSKTEKPPPGHVEHRKKKSSSNKHFPEIGAGFCCVVPRSSLRPLAGNVLHILRRLKINLLDMEAALPEEALKPSKVHLDRRLAWRVYVKSAGSIYEMIQATIILEEMIKTDYLRNEWWYWSSFSAAAKTSTIASLALRIYSLDAVIVYEKATPNLDSTNSLKPVGMLDKKPLPGLDLTDKSKVSRKSNKKRKEPE

SEQ ID NO: 842 - protein, 2190 aa, Brassica napus
MELTDSTKKQLGETRSAALDEDNRSFLGIDLNEIPTGATPGGAVQDDDGEYEPVEVVRSIHDNPDPAPGAPAEVPEPDRDAACGACGRPESMELVVVCDACERGFHLSCVDDGVEAAPSADWMCSDCVAGGGRSKLWPLGVKSKLILDMNASPPSDAEGYGGEDTSDSRKHMLAMGNSFEHSMTHSSFLDPGRAHTLGFGFPSNLGNSTLPIRFPSLDPSELLLQNLRHFISERHGVLEDGWHVEFKQPLNGYHLCPVYCSPSGKTFSSIQDVACYLGLATNGNYSCMDTDIRNESSLLQERLNMPKRRKTSRWPNNSFPDLKGSSVSAQLSRFPYNGQTMPPFAISSGESLSSGNNGCGCEEANKGLPMQFEDFFVLSLGRIDIRQSYHNVNMIYPIGYKSCWHDKITGSLFTCEVSGGSSGPVFKITRSPCSKSFVPVGSTVFSCPKIDEMVEQNIDKRGDRRDSIQEHDDDTVEILLSDPSPPLGDDILSCLQEKSFSSTFYCLRSEVGSSQVDLNNTLSYNQQHEVEIGDIIVEEDSLSVAWQKVSQKLVDACSNVLKHKGTMNFRCKHVDRETREINWDTRNEKDNVILSLSRFCCSLAPHSATCGGKDNSEIASLVDVLSRWLDQSRFGLDADFVQEMIERMPGAESCSNYRSLKTRSSSVSVTVAEGALIANPKVGENVREEVFGEISRKAKRHKLNGGHGFSNPHPPPGRPMCLRLPPVVVGDFLQVSEVFWRFREILGLGEAFSPEKLEQEIVNPVFDGLFLDKSGKEVNRSEMNISDEDRTATKFLSLLDESRQPFSSENTFASVLKETKAGDSTEFNISNSSRGPCVGALLTKTHISLLQVLICELQSKVAAFVDPNFDSGESRSRRGRKKDDSTLSAKRNKLHMLPVNEFTWPELARRYILSLLSMDGNLESAEIAARESGKVFRCLQGDGGLLCGSLTGVDGMEADSMLLAEAIKKIFGSLTRENDVLSVEDDDSDGLDATETNACNGDIPEWALVLEPVRKLPTNVGTRIRKCVYDALERNPPEWAKKILEHSISKEVYKGNASGPTKKAVLSLLADVRGGDLVQKSVKGTKKRTSIGVSDVIMKKCRAVLRDVAAVDEDKVFCTLLGRKLLNLNDNDDDGLLGSPAMVSRPLDFRTIDLRLAVGAYDGSTEAFLEDILELWSCIRVMYADQPDSLELVEKLSKKFKSLYEAELGSLLKSNGRDSLIKQILLRLIVCESYRSLRSELDAFEGFFLLCACRIIVVLAFQFPGVVLPLAQKLMDYRKLECLSAEMRKEIKDIVVSVNKLPKAPWDEGVCKICGVDKDDDSVLLCDTCDAEYHTYCLNPPLIRIPDGNWYCPSCVIAKRMAQDALESNKLVRRRKRRKYQGELTRASMETAARLVDVMGEKDYWEFSAEERILVLKLLCDELLSSSLVHQHLEQCAEALIEMQQKLRSLSSEWKNTKLRQEFLTAKLAKVEPSILKEMGEPQNSSSFADHHGRHQQQENVGEKVPHDDGTSSAAFLTNNQGKAPIETHAQTGGSNVISSENKIHTPEKVTSPGRNELPIEVTDHMSCEIEDTTETLDKSVGKNRETHSIKPNAAELKTAHDASSLASQELQACRQDLNATSNEIQNLQQSIRSIESQILRQSIRRDFLGSDGSGRLYWGCYFAEEHPRILVDGSMSLQKAVQVDLTGSKVPSPFLHAVDHGRLMVSPWTYYETEAEISELVLWLHDDDPKERELRESIMCWKRIRFGDLQREIKQAENSSSPIMAGDLVTKAAMAMEKRYGPCIKLEIETYKKRGKKTKCAEREKLCRCECLESILPSMIHCLICHKTFASDDEFEEHAESKCVPYSLATEEGKEKSDSSKAKESLKSDYLSVKSSAGKDKAEISNVSELGSGLIRYQEEESISPYHFEEICSKFVTKDSNRDLVKEIGLIGSNGSPTFLPLPSIHLNDPMLISATCNKLDGGDSGDQVIFTGSEANGEGLNSESLDRSVTNDLGNPLNKLSGMGCDKSEEKNKKSTGSGLKGCCVVPQASLKRVTGKALPVFRFLKTNLLDMDVALPEEALRPSKSHPDRRRAWRAFVKSAQSIFELVQAAIVVEDMIKTEYLKNEWWYWSSLSAAAKISTLSALSLHIFSLDAAIMYDKTITQSDPMDATKEIGLQEQKSQPVTDPQERSSRANRRSGKKRKEPEGA

SEQ ID NO: 843 - DNA, 3738 bp, Artificial Sequence
  Synthetic Construct
agtctagctcaacagagcttttaacccaaattggtacaatagaatacaactttagatcataattctcaaaagaaagagattccttagctattctatctgccactccatttccttctcggcttgtatgcacaagcataaaatcctcaaacttgctaagtagatactttatgtcttggataattggattgagacttgacaagcataactttcatgtaaccaaagacacaagttgctgagaatccacctcaaaaatgatcttcctataattgaatcgggataatgacagcacagcccatctaagagcctccacttctacttccagcacgcttcttacttttaccacagctcttgcacctaaccataacaccttccctgtatgatcgcgaagcacccaccctaagccacattttaatccttctgttggccatgccccatcaaagttgcacttaacccaagattgtggtggagcttcccatgtttctcgtctgtcccgacggtgttgtggttggtgctttccttacattctgagcctctttccttctaatccactcatctgcatcttcttgtgtccttactaatacctcattggttccaaattccctccctttaagcaccagctcgtttctgttcttccacagcctcccaagtatccaagggactaaagcctccacattcttcagatcaggatattcttgtttaagatgttgaactctatggaggtttgtatgaactgatgatctaggaccggataagttcccttcttcatagcgaacttattcaaagaatgttttgtgtatcattcttgttacattgttattaatgaaaaaatattattggtcattggactgaacacgagtgttaaatatggaccaggccccaaataagatccattgatatatgaattaaataacaagaataaatcgagtcaccaaaccacttgccttttttaacgagacttgttcaccaacttgatacaaaagtcattatcctatgcaaatcaataatcatacaaaaatatccaataacactaaaaaattaaaagaaatggataatttcacaatatgttatacgataaagaagttacttttccaagaaattcactgattttataagcccacttgcattagataaatggcaaaaaaaaacaaaaaggaaaagaaataaagcacgaagaattctagaaaatacgaaatacgcttcaatgcagtgggacccacggttcaattattgccaattttcagctccaccgtatatttaaaaaataaaacgataatgctaaaaaaatataaatcgtaacgatcgttaaatctcaacggctggatcttatgacgaccgttagaaattgtggttgtcgacgagtcagtaataaacggcgtcaaagtggttgcagccggcacacacgagtcgtgtttatcaactcaaagcacaaatacttttcctcaacctaaaaataaggcaattagccaaaaacaactttgcgtgtaaacaacgctcaatacacgtgtcattttattattagctattgcttcaccgccttagctttctcgtgacctagtcgtcctcgtcttttcttcttcttcttctataaaacaatacccaaagagctcttcttcttcacaattcagatttcaatttctcaaaatcttaaaaactttctctcaattctctctaccgtgatcaaggtaaatttctgtgttccttattctctcaaaatcttcgattttgttttcgttcgatcccaatttcgtatatgttctttggtttagattctgttaatcttagatcgaagacgattttctgggtttgatcgttagatatcatcttaattctcgattagggtttcatagatatcatccgatttgttcaaataatttgagttttgtcgaataattactcttcgatttgtgatttctatctagatctggtgttagtttctagtttgtgcgatcgaatttgtcgattaatctgagtttttctgattaacagatggttgagaaaccgtacaagtgcccggagtgtggtaagtcattttctaggtccgacgaacttgtcagacaccagcgaacgcatactggtgagaaaccttataagtgccccgaatgtgggaagtcattctctcgttccgataatcttgtgcgtcatcagaggacccatacgggcgagaaaccctataaatgtcccgaatgtggaaagtctttttcacagctcgcgcacctacgagctcatcagcgtactcacaccggggaaaaaccgtacaagtgccctgaatgcggtaagagcttttcaaggagcgataacctggtgcgtcatcaacgaacccacacgggcgaaaagccttacaagtgtcccgagtgcggtaaaagtttttctacgtccggtaacttagtccgtcaccagagaacgcatactggagaaaaaccttataaatgtccagaatgtgggaagagctttagccaattagctcatttgagggcacaccagcgtactcatactggaaaccgcgccaagcttggtaccgactacaaagacgatgacgacaaagactacaaagacgatgacgacaaagactacaaagacgatgacgacaaaggatcccttgaggttcttttcggcgcgccaagctatcaaacaagtttgtacaaaaaagcaggctccgcggccgcccccttcaccgagacaattcgtttgcccaaacctatgattgggtttggggttcctaccgaaccacttccagcaatggttcgaagaactcttcccgagcaagctgttggacccccgtttttctactatgaaaatgtggctctagctccaaagggtgtgtgggacacaatttctagatttttgtacgatattgagccagagtttgtcgactccaaatatttttgtgctgctgcaagaaaaaggggttatattcataatctgccggttgaaaatagatttcctttgtttccacttgccccacgtaccattcatgaggcacttcccctatcgaagaaatggtggccatcttgggacccacggacaaagttaaattgtttgcaaacagccattggaagtgcacaattgacgaataggattaggaaagctgtggaggactttgatggtgagccaccaatgagagttcagaagtttgttcttgatcaatgtcggaagtggaatttggtgtgggttgggagaaacaaagttgctcctttggagcctgatgaagttgaaatgctactgggatttccaaagaaccatactaggggaggtggtataagtaggaccgatagatacaagtcgcttggtaattcattccaggttgacactgtggcataccatttgtcggtattgaaagacttgtttcccggtggtatcaatgtcttatcactcttctctggaattggcggtggtgaagttgctctttatcgtcttggtattccactaaacacagtggtttctgtggaaaaatctgaagtcaacagggatattgtgagaagctggtgggagcaaactaatcagagagggaaccttatacattttaacgatgtgcagcagctgaatggagaccgcttggagcaactgatagagtcatttggaggatttgatttggtaattggtggaagcccgtgcaataaccttgcaggcagtaacagagtgagcagggatgggcttgaaggcaaagagtcttccctattttatgactatgttcggatattggacttggtcaagtccataatgtccagacataaacattag

SEQ ID NO: 844 - protein, 583 aa, Artificial Sequence
  Synthetic Construct
MVEKPYKCPECGKSFSRSDELVRHQRTHTGEKPYKCPECGKSFSRSDNLVRHQRTHTGEKPYKCPECGKSFSQLAHLRAHQRTHTGEKPYKCPECGKSFSRSDNLVRHQRTHTGEKPYKCPECGKSFSTSGNLVRHQRTHTGEKPYKCPECGKSFSQLAHLRAHQRTHTGNRAKLGTDYKDDDDKDYKDDDDKDYKDDDDKGSLEVLFGAPSYQTSLYKKAGSAAAPFTETIRLPKPMIGFGVPTEPLPAMVRRTLPEQAVGPPFFYYENVALAPKGVWDTISRFLYDIEPEFVDSKYFCAAARKRGYIHNLPVENRFPLFPLAPRTIHEALPLSKKWWPSWDPRTKLNCLQTAIGSAQLTNRIRKAVEDFDGEPPMRVQKFVLDQCRKWNLVWVGRNKVAPLEPDEVEMLLGFPKNHTRGGGISRTDRYKSLGNSFQVDTVAYHLSVLKDLFPGGINVLSLFSGIGGGEVALYRLGIPLNTVVSVEKSEVNRDIVRSWWEQTNQRGNLIHFNDVQQLNGDRLEQLIESFGGFDLVIGGSPCNNLAGSNRVSRDGLEGKESSLFYDYVRILDLVKSIMSRHKH

SEQ ID NO: 845 - protein, 171 aa, Artificial Sequence
  Synthetic Construct
MVEKPYKCPECGKSFSRSDELVRHQRTHTGEKPYKCPECGKSFSRSDNLVRHQRTHTGEKPYKCPECGKSFSQLAHLRAHQRTHTGEKPYKCPECGKSFSRSDNLVRHQRTHTGEKPYKCPECGKSFSTSGNLVRHQRTHTGEKPYKCPECGKSFSQLAHLRAHQRTHTGN

SEQ ID NO: 846 - DNA, 3654 bp, Artificial Sequence
  Synthetic Construct
agtctagctcaacagagcttttaacccaaattggtacaatagaatacaactttagatcataattctcaaaagaaagagattccttagctattctatctgccactccatttccttctcggcttgtatgcacaagcataaaatcctcaaacttgctaagtagatactttatgtcttggataattggattgagacttgacaagcataactttcatgtaaccaaagacacaagttgctgagaatccacctcaaaaatgatcttcctataattgaatcgggataatgacagcacagcccatctaagagcctccacttctacttccagcacgcttcttacttttaccacagctcttgcacctaaccataacaccttccctgtatgatcgcgaagcacccaccctaagccacattttaatccttctgttggccatgccccatcaaagttgcacttaacccaagattgtggtggagcttcccatgtttctcgtctgtcccgacggtgttgtggttggtgctttccttacattctgagcctctttccttctaatccactcatctgcatcttcttgtgtccttactaatacctcattggttccaaattccctccctttaagcaccagctcgtttctgttcttccacagcctcccaagtatccaagggactaaagcctccacattcttcagatcaggatattcttgtttaagatgttgaactctatggaggtttgtatgaactgatgatctaggaccggataagttcccttcttcatagcgaacttattcaaagaatgttttgtgtatcattcttgttacattgttattaatgaaaaaatattattggtcattggactgaacacgagtgttaaatatggaccaggccccaaataagatccattgatatatgaattaaataacaagaataaatcgagtcaccaaaccacttgccttttttaacgagacttgttcaccaacttgatacaaaagtcattatcctatgcaaatcaataatcatacaaaaatatccaataacactaaaaaattaaaagaaatggataatttcacaatatgttatacgataaagaagttacttttccaagaaattcactgattttataagcccacttgcattagataaatggcaaaaaaaaacaaaaaggaaaagaaataaagcacgaagaattctagaaaatacgaaatacgcttcaatgcagtgggacccacggttcaattattgccaattttcagctccaccgtatatttaaaaaataaaacgataatgctaaaaaaatataaatcgtaacgatcgttaaatctcaacggctggatcttatgacgaccgttagaaattgtggttgtcgacgagtcagtaataaacggcgtcaaagtggttgcagccggcacacacgagtcgtgtttatcaactcaaagcacaaatacttttcctcaacctaaaaataaggcaattagccaaaaacaactttgcgtgtaaacaacgctcaatacacgtgtcattttattattagctattgcttcaccgccttagctttctcgtgacctagtcgtcctcgtcttttcttcttcttcttctataaaacaatacccaaagagctcttcttcttcacaattcagatttcaatttctcaaaatcttaaaaactttctctcaattctctctaccgtgatcaaggtaaatttctgtgttccttattctctcaaaatcttcgattttgttttcgttcgatcccaatttcgtatatgttctttggtttagattctgttaatcttagatcgaagacgattttctgggtttgatcgttagatatcatcttaattctcgattagggtttcatagatatcatccgatttgttcaaataatttgagttttgtcgaataattactcttcgatttgtgatttctatctagatctggtgttagtttctagtttgtgcgatcgaatttgtcgattaatctgagtttttctgattaacagatggttgaaaagccatataaatgtcccgagtgcggcaagtcttttagcagatccgacgagctagtacgtcatcagagaacccacactggcgaaaaaccttacaaatgccccgagtgtggtaaaagtttttctcgaagcgataacctggtgcgtcatcagaggactcatacgggcgaaaagccctacaagtgtccggaatgcggcaagtcctttagtcaactcgctcatttaagggcacaccagcgaacgcacactggcgaaaaaccatataaatgccctgagtgcggcaagtctttttccagaagtgataatttggttcgacatcaacgaacgcataccggggagaagccctataaatgccctgaatgcggaaaatcattttccacgtcaggcaaccttgtccgtcatcaacgaacacacactggcaaccgcgccaagcttggtaccgactacaaagacgatgacgacaaagactacaaagacgatgacgacaaagactacaaagacgatgacgacaaaggatcccttgaggttcttttcggcgcgccaagctatcaaacaagtttgtacaaaaaagcaggctccgcggccgcccccttcaccgagacaattcgtttgcccaaacctatgattgggtttggggttcctaccgaaccacttccagcaatggttcgaagaactcttcccgagcaagctgttggacccccgtttttctactatgaaaatgtggctctagctccaaagggtgtgtgggacacaatttctagatttttgtacgatattgagccagagtttgtcgactccaaatatttttgtgctgctgcaagaaaaaggggttatattcataatctgccggttgaaaatagatttcctttgtttccacttgccccacgtaccattcatgaggcacttcccctatcgaagaaatggtggccatcttgggacccacggacaaagttaaattgtttgcaaacagccattggaagtgcacaattgacgaataggattaggaaagctgtggaggactttgatggtgagccaccaatgagagttcagaagtttgttcttgatcaatgtcggaagtggaatttggtgtgggttgggagaaacaaagttgctcctttggagcctgatgaagttgaaatgctactgggatttccaaagaaccatactaggggaggtggtataagtaggaccgatagatacaagtcgcttggtaattcattccaggttgacactgtggcataccatttgtcggtattgaaagacttgtttcccggtggtatcaatgtcttatcactcttctctggaattggcggtggtgaagttgctctttatcgtcttggtattccactaaacacagtggtttctgtggaaaaatctgaagtcaacagggatattgtgagaagctggtgggagcaaactaatcagagagggaaccttatacattttaacgatgtgcagcagctgaatggagaccgcttggagcaactgatagagtcatttggaggatttgatttggtaattggtggaagcccgtgcaataaccttgcaggcagtaacagagtgagcagggatgggcttgaaggcaaagagtcttccctattttatgactatgttcggatattggacttggtcaagtccataatgtccagacataaacattag

SEQ ID NO: 847 - protein, 555 aa, Artificial Sequence
  Synthetic Construct
MVEKPYKCPECGKSFSRSDELVRHQRTHTGEKPYKCPECGKSFSRSDNLVRHQRTHTGEKPYKCPECGKSFSQLAHLRAHQRTHTGEKPYKCPECGKSFSRSDNLVRHQRTHTGEKPYKCPECGKSFSTSGNLVRHQRTHTGNRAKLGTDYKDDDDKDYKDDDDKDYKDDDDKGSLEVLFGAPSYQTSLYKKAGSAAAPFTETIRLPKPMIGFGVPTEPLPAMVRRTLPEQAVGPPFFYYENVALAPKGVWDTISRFLYDIEPEFVDSKYFCAAARKRGYIHNLPVENRFPLFPLAPRTIHEALPLSKKWWPSWDPRTKLNCLQTAIGSAQLTNRIRKAVEDFDGEPPMRVQKFVLDQCRKWNLVWVGRNKVAPLEPDEVEMLLGFPKNHTRGGGISRTDRYKSLGNSFQVDTVAYHLSVLKDLFPGGINVLSLFSGIGGGEVALYRLGIPLNTVVSVEKSEVNRDIVRSWWEQTNQRGNLIHFNDVQQLNGDRLEQLIESFGGFDLVIGGSPCNNLAGSNRVSRDGLEGKESSLFYDYVRILDLVKSIMSRHKH

SEQ ID NO: 848 - protein, 143 aa, Artificial Sequence
  Synthetic Construct
MVEKPYKCPECGKSFSRSDELVRHQRTHTGEKPYKCPECGKSFSRSDNLVRHQRTHTGEKPYKCPECGKSFSQLAHLRAHQRTHTGEKPYKCPECGKSFSRSDNLVRHQRTHTGEKPYKCPECGKSFSTSGNLVRHQRTHTGN

SEQ ID NO: 849 - DNA, 10507 bp, Artificial Sequence
  Synthetic Construct
gcactgatgcacatgaggagtgcaaatttgaaaatataagataagaaacatgttgcaaagctgccacccaccgtatccaattgctactatttgtatcaatcagttacaaactgaaaaccaaaaatgaaatgactagaacaaataatgttaaaatgcacattgaaatagttaacaaggaaagcatacattgatcgataaaacgaatccaccacgttccaaaatattttgtcgcagatgttgcagacttgtagctaagttgggccggtagatgtaggtgacaagtgtttacaaatctgttaactgtcgctgtgttcctcctacttttgattttgtgttacactattcaaaagttggtcgactcttttaatcggttgattagactagtacttagtaaaatttgttgttaaaacttaaaagggagaagaagaagaagaatactgctttaattcttaattaatttttttttaaaattagtagtatcattaacgtgtttattacaccttcctcgagttactttcctcgtgatgccaatggtttttttaattctttaccttttcttctgacacagagtcacatatttgactacggaggagatctattgcttcctagttcctacttatctttatcgcgttgtaccaacatcaatataaaagcaacatcttactttataaacttccgtaaatttgataacaagtacaatcaagtttaaatttttctaaagttaacataaatttagcatcatacaataattaacattttttttaggttaaacttttggtgcgttacgtgagtagcagcatcttcgaaaatatgtttagtagtagtagtgataggaattaggaaaaggcacacacaaaaaagaaaaaaaaagggtaaaaggattcattcacgtttttttgttttctctctccaaacagaacttcgggaaaagtggacaaaaaaaaagaaaaaaatttaataagaaaacctctttttctcgcaatttggttttgttttcaatcttcttcttcttcttcttcgtcttcaatgcaaacaatgctcgattccattaacctaatcgaataatggaacccactgattctactaacgagcaactcggagacactaagaccgccgctgtcaaggaagagagtcgctcctttctcggcatcgatctcaacgaaatccctaccggcgctactctcggcggtggttgcaccgctggtcaggatgacgacggcgaatatgaacctgttgaagttgttaggtcaattcacgataacccggacccagcccctggagcccctgccgaggttcctgaaccggatcgggatgcttcgtgcggcgcgtgtggaagacctgagtctatagagctcgttgtagtctgcgatgcctgtgagcgaggctttcatatgtcttgtgtcaacgatggagttgaggcggctccttccgccgattggatgtgcagcgactgtcgtactggcggcgagaggagcaaactgtggccgttgggggttaagtccaagctcattctggacatgaacgcctcgccgcccagtgatgctgagggatacggagctgaggagacgtctgattcgaggtacgttcccctgcttctggtattcgacgatgcgttagggttttataagaattgaatttgggttgagatcgagaacatagttgcaagacttggttaagctgtctttacatgtattgcgagtaatgtgttcgattttaaagcgataaactattgaagattaagctggactaggatttggtgttgttgaatttaagtttcagtataagttgagcgttctgtgctaccgttcgttggagtttttaaggggcctttgatcttctcttatgaattacttatacatacgatatattttcaatcagttgtttagactttatttgattggacttgtctggccttatataacatgagtatgtctgagaaaacacatagccgaaattgtaaagcactgatggatcatgtggttgcttgtttcttcttctccagaaagcatatgctcgccagcagctcttgcattggaaactcttttgattatgcaatgatgcattcaagcttctcaagtctcggtagaggacatgctagtctcgaagcttcagggttaatgtctcgtaatactaaaatgagtatggatgcattgggttcacataatctaggttttggattcccattaaacttgaacaatagtagtttgcccatgagatttccatccttggatccaagtgagttgtttctgcaaaatctcaggcatttcatatctgaaaggcatggagtattggaagatggctggcgtgtcgaattcagacaacctttaaatggttatcagttatgtgcagtgtattgtgctccgaatggaaaaacatttagttcaatacaagaagttgcttgttatctgggcttggcaattaatggtaactacagctgtatggatgctgaaatcaggaatgagaattctcttcttcaagaaagattgcatacgcccaagagaagaaagacatcaagatggccaaacaatggtttccctgagcaaaagggtagttcagtgagtgctcaactcaggcgttttccattcaatggtcagaccatgtctcctttcgccgttaaatctggtactcattttcaggctggtggttctcttagctctggaaataatggatgcggttgtgaggaagctaaggtaagcgtaaaattgaaatctctcctgattgattgttttttccaatatttttgtaattcttaccctcatgtttgtgtatttgattttcagaatggatgtccgatgcagtttgaagatttctttgttctgtcgcttggacgaattgacataagacagtcttaccataatgtcaacgtgatttatccaataggatataagtcctgctggcatgacaagatcacggggtcactatttacatgtgaagtatctgatggcaattctggtcccattttcaaggttacacggtcaccatgctcgaaatcatttattccagctggatcaactgtcttctcctgcccaaagattgatgaaatggtggaacagaacagtgacaaacttagtaatcgtagagatagtactcaagagcgtgatgatgacgctagtgttgagatccttctttcggaacactgcccacctcttggagatgatatattgtcttgtttacgtgagaagagtttctccaagacagtcaattccctgcgctcagaggttgattcttctcgagtagattttgataaaaatttatcctatgatcaggaccatggggttgaaattggtgacattgttgtggaagaagattcattgtctgatgcatggaaaaaagtgtctcaaaaacttgttgatgcatgttcaattgtactgaagcagaagggtaccctgaatttcctatgtaagcatgttgacagagaaacaagtgaaatcaactgggataccatgaatgagaaagacaatgtaattttatcgttgtcaaaattttgctgttcgttggctccttgcagtgtcacgtgtggtgaaaaggataaaagcgaatttgcagcagtagttgatgctttgtcaaggtggctcgatcaaaacagatttggacttgatgcagattttgtacaggaaatgattgaacatatgcctggtgccgaatcatgtacgaattataggactctgaagagtagaagttcttcttctgttcctataactgtagcggaaggagcgctagtggtcaaaccaaaaggtggggaaaatgtcaaggacgaagttttcggtgagatttctcggaaagccaagaagcctaaactaaatggtggtcatggtgtcagaaatctacaccctcctcctgggaggccaatgtgtttgaggctccctcctgggcttgttggtgacttccttcaggtacggatatacgttttccttatatggtaatctacaacctacccctccattcactaagtcatgccgcacatatatgatagtcattttttatgcttgcctaattaggtatctgaagtgttctggcgtttccatgaaattttgggttttgaagaggctttctcacctgaaaaccttgaacaggagcttatcaatccagtgtttgatggtttgtttcttgataaacctgggaaagatgataagagaagtgagattaactttactgataaggattctacagctactaaacttttttctttgttcgatgaatctcgccaaccttttcctgcaaaaaatacctctgcttctgaactaaaggagaaaaaggcaggggattcttctgattttaagatttcagattcctctcgtgggtcgtgtgtgggtgcacttctaacaagggctcacatttcgcttctgcaagtgctaatatgtgagctgcaatccaaggtagctgcatttgttgatccaaactttgattctggcgaatcgagatccagacgaggacgaaaaaaggatgacagtacactttctgctaaaagaaataagctgcatatgcttcctgttaatgagttcacttggcctgaattggcccgtaggtacatcttgtctcttttatccatggatgggaacctcgaatcagcagagattgctgcacgtgaaagtggtaaggtattccgttgcttacaaggggatggtggtttgctttgcggctcgcttacaggagtggctgggatggaagcagattcaatggtatgtttttgttagttttctgattatttcctggattatatatcttgcttgtattactggatgatgggatcacaaattcagtttcacttttggaaacgccgcctatgtgctatttttcttttctcttcaaatgttctaaagcttatttgaagctatgttccacttgtaggtcactctagagtaattgacctttctttctcttcttggatcttgttagatgtattttgacatttagaggctgtttatcttgatatcttgaaggccctcttatatttatactgactggaaaattgggttactttgtgtttcaaatgagttcatgagctacctccactgaaagagaatgatcgttggatttacgtgtttatattaactctttatcttcagttacttgcagaggctattaagaaaatatctggttcgttgacaagcgaaaatgatgttctttctgtggaagatgatgattccgatggccttgatgctactgagacaaacacttgcagtggtgatattccagagtgggctcaggttttggaacctgtgaaaaagcttccaacaaatgttgggactagaatcagaaagtgtgtctatgaagctttagagagaaatccaccagagtgggcaaagaagatattggagcattctatcagtaaagaaatatataaaggcaatgcatcaggaccaacaaaggttcaaaatctctgaaaccaattctcttccctcctgaaatactgtacttgcaattttaaagtatttcttgttttctcaaattcactttgtttttctgtctcttgttcttgcggtgatgtaatctcagtctgatgatgcatgctactttcttagactcacattaattctgagattagttatttccctcttactggacacagaaagctgtcctctcattgctagcggatattcgaggtggagacttggtgcagaggtctattaaaggaaccaaaaagcggacatatataagtgtatctgatgtcattatgaagaaatgccgtgctgtattgcgtggtgttgcagctgcagacgaggataaagtcctttgcactttactgggaagaaagttactgaattccagtgataatgatgatgacgggctcctgggatcacctgcaatggtttcgcgtcccttagacttcagaactattgatttgaggttggctgctggtgcgtatgacggatcaactgaagcttttcttgaagatgttcttgaggttggattttccctcttatgtctgatttttctttgtgcaattgatggtatgatgctttttgtgcgatttaacaattagtttctgaatgcttatactaaaactgctattcattttgggcatttcatgtttctgctgttagtttaacactgctggtttagatgcgtaagtgtaaagtatcacaagagccagatttatattaggaatacttttactttctctttatgtcatagaagtatcaggttaaacggttgaacgccagaatttttgctggctcatttgataactttagatttgaatgcatgcaacttgattttttatagatgacatgctaaatataactttctaatttgcagctgtggagtagtatacgtgttatgtatgcagatcagcccgattgtgtggacctggttgcaacattgtctgaaaaattcaagtcgttatacgaggctgaggtttgtcttctctctcctttttctgctatgctctgcacaatagatatattcattacttagtagcatcttgaagtggagacagtcgtttatattttggcacttttgtgaaataaatgtgttaagatttatcatttctgaaagttataggccgatcaaagaagcatctggagatgcccattaatgctatatgctatgctttagaagggttcttccttttgtctgcgtgtatgattttcattgtgttcgcctttcagaaattgtatgcatggtctcctttttctatgagaatagttgcagtatcggggtgctattattttctcaagtttcaagcctttatttatttgctggtataggttgtaccacttgttcagaaacttaaggactacaggaaattggaatgcctaagtgcagagatgaagaaggaaattaaggacatagttgtttcagtaaataagcttcccaaggccccgtgggatgagggggtatgtaaagtatgtggcgttgacaaagatgatgacagtgttctcttgtgtgatacatgcgatgctgagtatcacacatattgtttaaatccacctcttattagaattcctgatggaaattggtattgtccatcttgtgtcattgccaagcgcatggctcaagaggctttggaatcttacaaactagttaggcggcggaaaggtagaaagtatcagggggaactcacccgagcttctatggaactgactgctcacctggcagatgtgatggaagaaaaggactactgggagtttagtgctgaggaggtcagttttgaaacttgtctcccattttttgctcattcattcgaaatgtgtcaacttttcattcccaacatgattttatttcgtggtgattacttgtgcaagtgatccctttacctataaattcttacaatcttttggtgctgtttccattggtattatggttgaatttttccctattctgatgcagagaatcttgctgcttaagcttctatgcgatgaactgcttagttcatctcttgtccatcaacaccttgagcagtgtgccgaagcaataattgaaatgcagcagaagttacgctctctttcctcagaatggaaaaacgcaaaaatgcggcaagaattcctgacggctaaactggcaaaggttgaaccgagtattctgaaggaagtgggcgaaccacataattcaagctactttgcagaccaaatgggatgtgatccacaaccacaggagggcgttggagacggagttactcgtgatgatgagacttcctctactgcatatcttaacaagaatcaaggtaaatctccacttgaaaccgatactcaacccggagagtcgcatgttaatttcggtgagagcaaaatttcctccccggaaacaatatcatcccctgggaggcatgagctacctatagcagatacctctcctcttgtaacagataatctgcctgaaaaagatacctcggagaccttgcttaagtcagttggaaggaatcatgaaacacattcaccaaattccaatgcagtagaattgccgacagctcatgatgcatcttctcaggcttcccaagagttgcaggcttgtcagcaggatttgagtgccactagtaatgaaattcagaatcttcagcaatcaattagaagcatagaatcacagcttctaaagcaatctatacggagagattttctgggaaccgatgctagtggtcggttatattggggttgctgcttcccagatgaaaatcctcgtatattggttgatggaagcatatctttgcagaaacctgttcaagccgatttgataggttcaaaagtcccctctccgtttctccataccgttgaccatggaagactaaggctttcaccctggacgtattatgaaactgaaaccgagatcagtgagcttgtccaatggcttcatgatgatgatctgaaagaaagagacctgagagagtctattttgtggtggaaaaggttacgatatggagacgttcaaaaggaaaagaaacaagctcagaatttatctgctccggtatttgctacgggtcttgagaccaaggctgccatgtcaatggagaagagatatggtccatgcatcaaactggagatggaaaccttaaaaaaacgggggaagaagacaaaggttgcagagcgagagaaattgtgtagatgcgaatgcttggaatccattttgccatctatgattcactgcctcatatgccataaaacattcgcaagtgatgatgagtttgaggatcacactgagagtaagtgtattccttattcattagcaactgaagaaggcaaggacatctctgattcttcaaaagccaaagaaagtctgaaatccgattatcttaatgtaaagtctagtgccggcaaagatgtagctgaaatatccaatgtttctgaacttgattctgggttgataagatatcaagaagaagaatctatttccccataccattttgaggagatctgttccaagtttgtgacaaaggattgcaacagagatttggttaaagagatcggtctgatcagttcaaatggcattccaacatttcttccatcgtcatctactcatcttaacgactccgtgctcatctctgccaaatccaataagccagatggtggtgattcaggggatcaggtcatttttgctggtcctgaaaccaatgttgaaggcttaaattctgaatctaacatgtcattcgatagatctgtcacagacagtcacgggggtccactggataaaccaagtggactgggttttggcttctcagagcaaaagaataagaaatcttcaggtagtgggttgaaaagctgctgtgtggttccacaggctgctttgaaacgagtaactggcaaagctttgccgggtttcaggttcctgaaaaccaacttgcttgatatggatgtagcactgcctgaagaagctttaagaccatcgaaatcacatccaaaccgtagaagagcttggcgtgtatttgttaaatcgtcgcaaagtatatacgaggtttgttttaatccttaaccttttctgctctctatctatagaaacagataacaagctgtttttctaatatctacgcttttcgtatttatttcagttggttcaggcaacaattgtggtagaagatatgattaagacagagtacttgaaaaatgaatggtggtactggtcttctctttcagcggctgctaaaatctcgactctctcagcgttatccgtccgtatcttctccctcgacgctgctatcatttatgataaacccataactccatcaaatcctatcgatgaaacaaagccgatcatcagcttaccggaccaaaagtcacagccggtttcggattctcaagaaagaagcagcagagttagaagatctggcaagaaaaggaaagaacccgagggatccaagggtgggcgcgccaagcttggtaccgactacaaagacgatgacgacaaagactacaaagacgatgacgacaaagactacaaagacgatgacgacaaaggatcccttgaggttcttttccaaggacctctcgagccttataaatgccctgagtgtggaaaatctttctctcaatctggagatcttaggaggcaccaaaggacccataccggtgaaaaaccttataaatgccctgagtgtggaaaatcattcagtaggagtgatcatcttaccacccatcagaggacccatactggtgaaaaaccttataaatgccctgagtgtggaaaatcattctcacaatcttcatctcttgttaggcatcagaggactcataccggagaaaaaccttataaatgccctgagtgtggaaaatcattctcaacatctggaaaccttgttaggcaccaaaggacccatactggtgaaaaaccttataaatgccctgagtgtggaaaatcattctctcagagagcaaaccttagggctcatcaaaggacacacactggagaaaaaccttataaatgccctgagtgtggaaaatctttctctaggagtgataagctcaccgagcatcaaaggactcacaccggactcgagggatctatggctggtggacttaacgatatcttcgaagctcagaagattgaatggcatgaggatactggtggatcttagtagtag

SEQ ID NO: 850 - protein, 2414 aa, Artificial Sequence
  Synthetic Construct
MEPTDSTNEQLGDTKTAAVKEESRSFLGIDLNEIPTGATLGGGCTAGQDDDGEYEPVEVVRSIHDNPDPAPGAPAEVPEPDRDASCGACGRPESIELVVVCDACERGFHMSCVNDGVEAAPSADWMCSDCRTGGERSKLWPLGVKSKLILDMNASPPSDAEGYGAEETSDSRKHMLASSSCIGNSFDYAMMHSSFSSLGRGHASLEASGLMSRNTKMSMDALGSHNLGFGFPLNLNNSSLPMRFPSLDPSELFLQNLRHFISERHGVLEDGWRVEFRQPLNGYQLCAVYCAPNGKTFSSIQEVACYLGLAINGNYSCMDAEIRNENSLLQERLHTPKRRKTSRWPNNGFPEQKGSSVSAQLRRFPFNGQTMSPFAVKSGTHFQAGGSLSSGNNGCGCEEAKNGCPMQFEDFFVLSLGRIDIRQSYHNVNVIYPIGYKSCWHDKITGSLFTCEVSDGNSGPIFKVTRSPCSKSFIPAGSTVFSCPKIDEMVEQNSDKLSNRRDSTQERDDDASVEILLSEHCPPLGDDILSCLREKSFSKTVNSLRSEVDSSRVDFDKNLSYDQDHGVEIGDIVVEEDSLSDAWKKVSQKLVDACSIVLKQKGTLNFLCKHVDRETSEINWDTMNEKDNVILSLSKFCCSLAPCSVTCGEKDKSEFAAVVDALSRWLDQNRFGLDADFVQEMIEHMPGAESCTNYRTLKSRSSSSVPITVAEGALVVKPKGGENVKDEVFGEISRKAKKPKLNGGHGVRNLHPPPGRPMCLRLPPGLVGDFLQVSEVFWRFHEILGFEEAFSPENLEQELINPVFDGLFLDKPGKDDKRSEINFTDKDSTATKLFSLFDESRQPFPAKNTSASELKEKKAGDSSDFKISDSSRGSCVGALLTRAHISLLQVLICELQSKVAAFVDPNFDSGESRSRRGRKKDDSTLSAKRNKLHMLPVNEFTWPELARRYILSLLSMDGNLESAEIAARESGKVFRCLQGDGGLLCGSLTGVAGMEADSMLLAEAIKKISGSLTSENDVLSVEDDDSDGLDATETNTCSGDIPEWAQVLEPVKKLPTNVGTRIRKCVYEALERNPPEWAKKILEHSISKEIYKGNASGPTKKAVLSLLADIRGGDLVQRSIKGTKKRTYISVSDVIMKKCRAVLRGVAAADEDKVLCTLLGRKLLNSSDNDDDGLLGSPAMVSRPLDFRTIDLRLAAGAYDGSTEAFLEDVLELWSSIRVMYADQPDCVDLVATLSEKFKSLYEAEVVPLVQKLKDYRKLECLSAEMKKEIKDIVVSVNKLPKAPWDEGVCKVCGVDKDDDSVLLCDTCDAEYHTYCLNPPLIRIPDGNWYCPSCVIAKRMAQEALESYKLVRRRKGRKYQGELTRASMELTAHLADVMEEKDYWEFSAEERILLLKLLCDELLSSSLVHQHLEQCAEAIIEMQQKLRSLSSEWKNAKMRQEFLTAKLAKVEPSILKEVGEPHNSSYFADQMGCDPQPQEGVGDGVTRDDETSSTAYLNKNQGKSPLETDTQPGESHVNFGESKISSPETISSPGRHELPIADTSPLVTDNLPEKDTSETLLKSVGRNHETHSPNSNAVELPTAHDASSQASQELQACQQDLSATSNEIQNLQQSIRSIESQLLKQSIRRDFLGTDASGRLYWGCCFPDENPRILVDGSISLQKPVQADLIGSKVPSPFLHTVDHGRLRLSPWTYYETETEISELVQWLHDDDLKERDLRESILWWKRLRYGDVQKEKKQAQNLSAPVFATGLETKAAMSMEKRYGPCIKLEMETLKKRGKKTKVAEREKLCRCECLESILPSMIHCLICHKTFASDDEFEDHTESKCIPYSLATEEGKDISDSSKAKESLKSDYLNVKSSAGKDVAEISNVSELDSGLIRYQEEESISPYHFEEICSKFVTKDCNRDLVKEIGLISSNGIPTFLPSSSTHLNDSVLISAKSNKPDGGDSGDQVIFAGPETNVEGLNSESNMSFDRSVTDSHGGPLDKPSGLGFGFSEQKNKKSSGSGLKSCCVVPQAALKRVTGKALPGFRFLKTNLLDMDVALPEEALRPSKSHPNRRRAWRVFVKSSQSIYELVQATIVVEDMIKTEYLKNEWWYWSSLSAAAKISTLSALSVRIFSLDAAIIYDKPITPSNPIDETKPIISLPDQKSQPVSDSQERSSRVRRSGKKRKEPEGSKGGRAKLGTDYKDDDDKDYKDDDDKDYKDDDDKGSLEVLFQGPLEPYKCPECGKSFSQSGDLRRHQRTHTGEKPYKCPECGKSFSRSDHLTTHQRTHTGEKPYKCPECGKSFSQSSSLVRHQRTHTGEKPYKCPECGKSFSTSGNLVRHQRTHTGEKPYKCPECGKSFSQRANLRAHQRTHTGEKPYKCPECGKSFSRSDKLTEHQRTHTGLEGSMAGGLNDIFEAQKIEWHEDTGGS

SEQ ID NO: 851 - DNA, 20 bp, Artificial Sequence
  Synthetic Construct
gagatatagagatgagagag

SEQ ID NO: 852 - DNA, 20 bp, Artificial Sequence
  Synthetic Construct
atagtactagtaatgatttg

SEQ ID NO: 853 - DNA, 83 bp, Artificial Sequence; identical to SEQ ID NO: 400
  Synthetic Construct

SEQ ID NO: 854 - DNA, 7099 bp, Artificial Sequence; identical to SEQ ID NO: 767
  Synthetic Construct

SEQ ID NO: 855 - protein, 1661 aa, Artificial Sequence; identical to SEQ ID NO: 776
  Synthetic Construct

SEQ ID NO: 856 - DNA, 6006 bp, Artificial Sequence
  Synthetic Construct
atgcatatgagtctagctcaacagagcttttaacccaaattggtacaatagaatacaactttagatcataattctcaaaagaaagagattccttagctattctatctgccactccatttccttctcggcttgtatgcacaagcataaaatcctcaaacttgctaagtagatactttatgtcttggataattggattgagacttgacaagcataactttcatgtaaccaaagacacaagttgctgagaatccacctcaaaaatgatcttcctataattgaatcgggataatgacagcacagcccatctaagagcctccacttctacttccagcacgcttcttacttttaccacagctcttgcacctaaccataacaccttccctgtatgatcgcgaagcacccaccctaagccacattttaatccttctgttggccatgccccatcaaagttgcacttaacccaagattgtggtggagcttcccatgtttctcgtctgtcccgacggtgttgtggttggtgctttccttacattctgagcctctttccttctaatccactcatctgcatcttcttgtgtccttactaatacctcattggttccaaattccctccctttaagcaccagctcgtttctgttcttccacagcctcccaagtatccaagggactaaagcctccacattcttcagatcaggatattcttgtttaagatgttgaactctatggaggtttgtatgaactgatgatctaggaccggataagttcccttcttcatagcgaacttattcaaagaatgttttgtgtatcattcttgttacattgttattaatgaaaaaatattattggtcattggactgaacacgagtgttaaatatggaccaggccccaaataagatccattgatatatgaattaaataacaagaataaatcgagtcaccaaaccacttgccttttttaacgagacttgttcaccaacttgatacaaaagtcattatcctatgcaaatcaataatcatacaaaaatatccaataacactaaaaaattaaaagaaatggataatttcacaatatgttatacgataaagaagttacttttccaagaaattcactgattttataagcccacttgcattagataaatggcaaaaaaaaacaaaaaggaaaagaaataaagcacgaagaattctagaaaatacgaaatacgcttcaatgcagtgggacccacggttcaattattgccaattttcagctccaccgtatatttaaaaaataaaacgataatgctaaaaaaatataaatcgtaacgatcgttaaatctcaacggctggatcttatgacgaccgttagaaattgtggttgtcgacgagtcagtaataaacggcgtcaaagtggttgcagccggcacacacgagtcgtgtttatcaactcaaagcacaaatacttttcctcaacctaaaaataaggcaattagccaaaaacaactttgcgtgtaaacaacgctcaatacacgtgtcattttattattagctattgcttcaccgccttagctttctcgtgacctagtcgtcctcgtcttttcttcttcttcttctataaaacaatacccaaagagctcttcttcttcacaattcagatttcaatttctcaaaatcttaaaaactttctctcaattctctctaccgtgatcaaggtaaatttctgtgttccttattctctcaaaatcttcgattttgttttcgttcgatcccaatttcgtatatgttctttggtttagattctgttaatcttagatcgaagacgattttctgggtttgatcgttagatatcatcttaattctcgattagggtttcatagatatcatccgatttgttcaaataatttgagttttgtcgaataattactcttcgatttgtgatttctatctagatctggtgttagtttctagtttgtgcgatcgaatttgtcgattaatctgagtttttctgattaacacctagggtttatgggccccgacatcgtgatgacccagagccccagcagcctgagcgccagcgtgggcgaccgcgtgaccatcacctgccgcagcagcaccggcgccgtgaccaccagcaactacgccagctgggtgcaggagaagcccggcaagctgttcaagggcctgatcggcggcaccaacaaccgcgcccccggcgtgcccagccgcttcagcggcagcctgatcggcgacaaggccaccctgaccatcagcagcctgcagcccgaggacttcgccacctacttctgcgccctgtggtacagcaaccactgggtgttcggccagggcaccaaggtggagctgaagcgcggcggcggcggcagcggcggcggcggcagcggcggcggcggcagcagcggcggcggcagcgaggtgaagctgctggagagcggcggcggcctggtgcagcccggcggcagcctgaagctgagctgcgccgtgagcggcttcagcctgaccgactacggcgtgaactgggtgcgccaggcccccggccgcggcctggagtggatcggcgtgatctggggcgacggcatcaccgactacaacagcgccctgaaggaccgcttcatcatcagcaaggacaacggcaagaacaccgtgtacctgcagatgagcaaggtgcgcagcgacgacaccgccctgtactactgcgtgaccggcctgttcgactactggggccagggcaccctggtgaccgtgagcagctacccatacgatgttccagattacgctggtggaggcggaggttctgggggaggaggtagtggcggtggtggttcaggaggcggcggaagcttggatccaggtggaggtggaagcggtagcaaaggagaagaacttttcactggagttgtcccaattcttgttgaattagatggtgatgttaatgggcacaaattttctgtccgtggagagggtgaaggtgatgctacaaacggaaaactcacccttaaatttatttgcactactggaaaactacctgttccgtggccaacacttgtcactactctgacctatggtgttcaatgcttttcccgttatccggatcacatgaaacggcatgactttttcaagagtgccatgcccgaaggttatgtacaggaacgcactatatctttcaaagatgacgggacctacaagacgcgtgctgaagtcaagtttgaaggtgatacccttgttaatcgtatcgagttaaagggtattgattttaaagaagatggaaacattcttggacacaaactcgagtacaactttaactcacacaatgtatacatcacggcagacaaacaaaagaatggaatcaaagctaacttcaaaattcgccacaacgttgaagatggttccgttcaactagcagaccattatcaacaaaatactccaattggcgatggccctgtccttttaccagacaaccattacctgtcgacacaatctgtcctttcgaaagatcccaacgaaaagcgtgaccacatggtccttcttgagtttgtaactgctgctgggattacacatggcatggatgagctctacaaaggtggaggtcggaccggtcgtacgggcggtggcggagggagcagggctgaccccaagaagaagaggaaggtggaggccagcggttcctccggactcagatctcgagctcaaaaccatgaccaggaatttgaccccccaaaggtttacccacctgtgccagctgagaagaggaagcccatccgcgtgctgtctctctttgatgggattgctacagggctcctggtgctgaaggacctgggcatccaagtggaccgctacattgcctccgaggtgtgtgaggactccatcacggtgggcatggtgcggcaccagggaaagatcatgtacgtcggggacgtccgcagcgtcacacagaagcatatccaggagtggggcccattcgacctggtgattggaggcagtccctgcaatgacctctccattgtcaaccctgcccgcaagggactttatgagggtactggccgcctcttctttgagttctaccgcctcctgcatgatgcgcggcccaaggagggagatgatcgccccttcttctggctctttgagaatgtggtggccatgggcgttagtgacaagagggacatctcgcgatttcttgagtctaaccccgtgatgattgacgccaaagaagtgtctgctgcacacagggcccgttacttctggggtaaccttcctggcatgaacaggcctttggcatccactgtgaatgataagctggagctgcaagagtgtctggagcacggcagaatagccaagttcagcaaagtgaggaccattaccaccaggtcaaactctataaagcagggcaaagaccagcatttccccgtcttcatgaacgagaaggaggacatcctgtggtgcactgaaatggaaagggtgtttggcttccccgtccactacacagacgtctccaacatgagccgcttggcgaggcagagactgctgggccgatcgtggagcgtgccggtcatccgccacctcttcgctccgctgaaggaatattttgcttgtgtgtctagcggcaatagtaacgctaacagccgcgggccgagcttcagcagcggcctggtgccgttaagcttgcgcggcagccatatgggccctatggagatatacaagacagtgtctgcatggaagagacagccagtgcgggtactgagcctttttagaaatattgataaagtactaaagagtttgggctttttagaaagcggttctggttctgggggaggaacgctgaagtacgtggaagatgtcacaaatgtcgtgaggagagacgtggagaaatggggcccctttgacctggtgtacggctcgacgcagcccctaggcagctcctgtgatcgctgtcccggctggtacatgttccagttccaccggatcctgcagtatgcgctgcctcgccaggagagtcagcggcccttcttctggatattcatggacaatctgctgctgactgaggatgaccaagagacaactacccgcttccttcagacagaggctgtgaccctccaggatgtccgtggcagggactaccagaatgctatgcgggtgtggagcaacattccagggctgaagagcaagcatgcgcccctgaccccaaaggaagaagagtatctgcaagcccaagtcagaagcaggagcaagctggacgccccgaaagttgacctcctggtgaagaactgccttctcccgctgagagagtacttcaagtatttttctcaaaactcacttcctcttagttccggatctccgaaaaagaaacgcaaagttgactacaaagaccatgacggtgattataaagatcatgacatcgattacaaggatgacgatgacaagtctagaggcggtggcggaggggctccaaagaagaagagaaaggtccgtacgggaggaggatctcggaccgaagagtacaagcttatcctgaacggtaaaaccctgaaaggtgaaaccaccaccgaagctgttgacgctgctaccgcggaaaaagttttcaaacagtacgctaacgacaacggtgttgacggtgaatggacctacgacgacgctaccaaaaccttcacggtaaccgaaggtggtggtagcggtggtggtactagtccaaaaacaaggaggagaccgcgaagatcacaacggaaaaggccgcctacgccatggccgtaagtttgagctcgaatttccccgatcgttcaaacatttggcaataaagtttcttaagattgaatcctgttgccggtcttgcgatgattatcatataatttctgttgaattacgttaagcatgtaataattaacatgtaatgcatgacgttatttatgagatgggtttttatgattagagtcccgcaattatacatttaatacgcgatagaaaacaaaatatagcgcgcaaactaggataaattatcgcgcgcggtgtcatctatgttac

SEQ ID NO: 857 - protein, 1244 aa, Artificial Sequence
  Synthetic Construct
MGPDIVMTQSPSSLSASVGDRVTITCRSSTGAVTTSNYASWVQEKPGKLFKGLIGGTNNRAPGVPSRFSGSLIGDKATLTISSLQPEDFATYFCALWYSNHWVFGQGTKVELKRGGGGSGGGGSGGGGSSGGGSEVKLLESGGGLVQPGGSLKLSCAVSGFSLTDYGVNWVRQAPGRGLEWIGVIWGDGITDYNSALKDRFIISKDNGKNTVYLQMSKVRSDDTALYYCVTGLFDYWGQGTLVTVSSYPYDVPDYAGGGGGSGGGGSGGGGSGGGGSLDPGGGGSGSKGEELFTGVVPILVELDGDVNGHKFSVRGEGEGDATNGKLTLKFICTTGKLPVPWPTLVTTLTYGVQCFSRYPDHMKRHDFFKSAMPEGYVQERTISFKDDGTYKTRAEVKFEGDTLVNRIELKGIDFKEDGNILGHKLEYNFNSHNVYITADKQKNGIKANFKIRHNVEDGSVQLADHYQQNTPIGDGPVLLPDNHYLSTQSVLSKDPNEKRDHMVLLEFVTAAGITHGMDELYKGGGRTGRTGGGGGSRADPKKKRKVEASGSSGLRSRAQNHDQEFDPPKVYPPVPAEKRKPIRVLSLFDGIATGLLVLKDLGIQVDRYIASEVCEDSITVGMVRHQGKIMYVGDVRSVTQKHIQEWGPFDLVIGGSPCNDLSIVNPARKGLYEGTGRLFFEFYRLLHDARPKEGDDRPFFWLFENVVAMGVSDKRDISRFLESNPVMIDAKEVSAAHRARYFWGNLPGMNRPLASTVNDKLELQECLEHGRIAKFSKVRTITTRSNSIKQGKDQHFPVFMNEKEDILWCTEMERVFGFPVHYTDVSNMSRLARQRLLGRSWSVPVIRHLFAPLKEYFACVSSGNSNANSRGPSFSSGLVPLSLRGSHMGPMEIYKTVSAWKRQPVRVLSLFRNIDKVLKSLGFLESGSGSGGGTLKYVEDVTNVVRRDVEKWGPFDLVYGSTQPLGSSCDRCPGWYMFQFHRILQYALPRQESQRPFFWIFMDNLLLTEDDQETTTRFLQTEAVTLQDVRGRDYQNAMRVWSNIPGLKSKHAPLTPKEEEYLQAQVRSRSKLDAPKVDLLVKNCLLPLREYFKYFSQNSLPLSSGSPKKKRKVDYKDHDGDYKDHDIDYKDDDDKSRGGGGGAPKKKRKVRTGGGSRTEEYKLILNGKTLKGETTTEAVDAATAEKVFKQYANDNGVDGEWTYDDATKTFTVTEGGGSGGGTSPKTRRRPRRSQRKRPPTPWP

SEQ ID NO: 858 - DNA, 553 bp, Artificial Sequence; identical to SEQ ID NO: 800
  Synthetic Construct

SEQ ID NO: 859 - protein, 543 aa, Artificial Sequence
  Synthetic Construct
NHDQEFDPPKVYPPVPAEKRKPIRVLSLFDGIATGLLVLKDLGIQVDRYIASEVCEDSITVGMVRHQGKIMYVGDVRSVTQKHIQEWGPFDLVIGGSPCNDLSIVNPARKGLYEGTGRLFFEFYRLLHDARPKEGDDRPFFWLFENVVAMGVSDKRDISRFLESNPVMIDAKEVSAAHRARYFWGNLPGMNRPLASTVNDKLELQECLEHGRIAKFSKVRTITTRSNSIKQGKDQHFPVFMNEKEDILWCTEMERVFGFPVHYTDVSNMSRLARQRLLGRSWSVPVIRHLFAPLKEYFACVSSGNSNANSRGPSFSSGLVPLSLRGSHMGPMEIYKTVSAWKRQPVRVLSLFRNIDKVLKSLGFLESGSGSGGGTLKYVEDVTNVVRRDVEKWGPFDLVYGSTQPLGSSCDRCPGWYMFQFHRILQYALPRQESQRPFFWIFMDNLLLTEDDQETTTRFLQTEAVTLQDVRGRDYQNAMRVWSNIPGLKSKHAPLTPKEEEYLQAQVRSRSKLDAPKVDLLVKNCLLPLREYFKYFSQNSLPL

SEQ ID NO: 860 - DNA, 450 bp, Artificial Sequence; identical to SEQ ID NO: 801
  Synthetic Construct

SEQ ID NO: 861 - protein, 908 aa, Mus musculus
MPSSGPGDTSSSSLEREDDRKEGEEQEENRGKEERQEPSATARKVGRPGRKRKHPPVESSDTPKDPAVTTKSQPMAQDSGPSDLLPNGDLEKRSEPQPEEGSPAAGQKGGAPAEGEGTETPPEASRAVENGCCVTKEGRGASAGEGKEQKQTNIESMKMEGSRGRLRGGLGWESSLRQRPMPRLTFQAGDPYYISKRKRDEWLARWKREAEKKAKVIAVMNAVEENQASGESQKVEEASPPAVQQPTDPASPTVATTPEPVGGDAGDKNATKAADDEPEYEDGRGFGIGELVWGKLRGFSWWPGRIVSWWMTGRSRAAEGTRWVMWFGDGKFSVVCVEKLMPLSSFCSAFHQATYNKQPMYRKAIYEVLQVASSRAGKLFPACHDSDESDSGKAVEVQNKQMIEWALGGFQPSGPKGLEPPEEEKNPYKEVYTDMWVEPEAAAYAPPPPAKKPRKSTTEKPKVKEIIDERTRERLVYEVRQKCRNIEDICISCGSLNVTLEHPLFIGGMCQNCKNCFLECAYQYDDDGYQSYCTICCGGREVLMCGNNNCCRCFCVECVDLLVGPGAAQAAIKEDPWNCYMCGHKGTYGLLRRREDWPSRLQMFFANNHDQEFDPPKVYPPVPAEKRKPIRVLSLFDGIATGLLVLKDLGIQVDRYIASEVCEDSITVGMVRHQGKIMYVGDVRSVTQKHIQEWGPFDLVIGGSPCNDLSIVNPARKGLYEGTGRLFFEFYRLLHDARPKEGDDRPFFWLFENVVAMGVSDKRDISRFLESNPVMIDAKEVSAAHRARYFWGNLPGMNRPLASTVNDKLELQECLEHGRIAKFSKVRTITTRSNSIKQGKDQHFPVFMNEKEDILWCTEMERVFGFPVHYTDVSNMSRLARQRLLGRSWSVPVIRHLFAPLKEYFACV

SEQ ID NO: 862 - protein, 387 aa, Homo sapiens
MAAIPALDPEAEPSMDVILVGSSELSSSVSPGTGRDLIAYEVKANQRNIEDICICCGSLQVHTQHPLFEGGICAPCKDKFLDALFLYDDDGYQSYCSICCSGETLLICGNPDCTRCYCFECVDSLVGPGTSGKVHAMSNWVCYLCLPSSRSGLLQRRRKWRSQLKAFYDRESENPLEMFETVPVWRRQPVRVLSLFEDIKKELTSLGFLESGSDPGQLKHVVDVTDTVRKDVEEWGPFDLVYGATPPLGHTCDRPPSWYLFQFHRLLQYARPKPGSPRPFFWMFVDNLVLNKEDLDVASRFLEMEPVTIPDVHGGSLQNAVRVWSNIPAIRSSRHWALVSEEELSLLAQNKQSSKLAAKWPTKLVKNCFLPLREYFKYFSTELTSSL

SEQ ID NO: 863 - protein, 12 aa, Artificial Sequence
  Synthetic Construct
AEAAAKEAAAKA

SEQ ID NO: 864 - protein, 16 aa, Artificial Sequence
  Synthetic Construct
SGSETPGTSESATPES

SEQ ID NO: 865 - protein, 15 aa, Artificial Sequence
  Synthetic Construct
SGGGSGGGGSGGGGS

SEQ ID NO: 866 - protein, 18 aa, Artificial Sequence
  Synthetic Construct
GSSGSNGPGGSGGGGSGG

SEQ ID NO: 867 - protein, 9 aa, Artificial Sequence
  Synthetic Construct
SSGPPPGTG

SEQ ID NO: 868 - protein, 12 aa, Artificial Sequence
  Synthetic Construct
AEAAAKEAAAKA

SEQ ID NO: 869 - protein, 16 aa, Artificial Sequence
  Synthetic Construct
SGSETPGTSESATPES

SEQ ID NO: 870 - DNA, 35 bp, Artificial Sequence
  Synthetic Construct
ggaagcttaggccttagaaatctcaaaattccggc

SEQ ID NO: 871 - DNA, 38 bp, Artificial Sequence
  Synthetic Construct
atggcgaaaagcaaaaacccaatcactacttcgtctct

SEQ ID NO: 872 - DNA, 40 bp, Artificial Sequence
  Synthetic Construct
gggtttttgcttttcgccatgttttagagctagaaatagc

SEQ ID NO: 873 - DNA, 33 bp, Artificial Sequence
  Synthetic Construct
ggcaacgcgttctagtaatgccaactttgtaca

SEQ ID NO: 874 - DNA, 20 bp, Artificial Sequence
  Synthetic Construct
attctcgacggaaagatgta

SEQ ID NO: 875 - DNA, 20 bp, Artificial Sequence
  Synthetic Construct
acggaaagatgtatgggctt

SEQ ID NO: 876 - DNA, 20 bp, Artificial Sequence
  Synthetic Construct
ccattggtccaagtgctatt

SEQ ID NO: 877 - DNA, 20 bp, Artificial Sequence
  Synthetic Construct
gcggcgcaagatctgatatt

SEQ ID NO: 878 - DNA, 20 bp, Artificial Sequence
  Synthetic Construct
aaaactaggccatccatgga

SEQ ID NO: 879 - DNA, 20 bp, Artificial Sequence
  Synthetic Construct
gacacacacatacacatacg

SEQ ID NO: 880 - DNA, 20 bp, Artificial Sequence
  Synthetic Construct
gcccttcaattccgtagctt

SEQ ID NO: 881 - DNA, 20 bp, Artificial Sequence
  Synthetic Construct
ggtgggatcttccaaagcta

SEQ ID NO: 882 - DNA, 20 bp, Artificial Sequence
  Synthetic Construct
ggagagaaggatatgatgca

SEQ ID NO: 883 - DNA, 20 bp, Artificial Sequence
  Synthetic Construct
gacaatctctgatgtgaagt

SEQ ID NO: 884 - DNA, 20 bp, Artificial Sequence
  Synthetic Construct
gtactatgtaggcacgactt

SEQ ID NO: 885 - DNA, 20 bp, Artificial Sequence
  Synthetic Construct
gtcaatccgtatcgtagggg

SEQ ID NO: 886 - DNA, 20 bp, Artificial Sequence
  Synthetic Construct
gagcaaagacgctcgtcatg

SEQ ID NO: 887 - DNA, 20 bp, Artificial Sequence
  Synthetic Construct
ggctcgtcatgcggtacacg

SEQ ID NO: 888 - DNA, 20 bp, Artificial Sequence
  Synthetic Construct
gcgacttgaacccaaacctg

SEQ ID NO: 889 - DNA, 20 bp, Artificial Sequence
  Synthetic Construct
gttctcgatgtagtcagtgg

SEQ ID NO: 890 - DNA, 20 bp, Artificial Sequence
  Synthetic Construct
gggtggagcctccctggaga

SEQ ID NO: 891 - DNA, 20 bp, Artificial Sequence
  Synthetic Construct
gatcagctctgaagcggtga

SEQ ID NO: 892 - DNA, 20 bp, Artificial Sequence
  Synthetic Construct
gatggtgtctcctctctgaa

SEQ ID NO: 893 - DNA, 20 bp, Artificial Sequence
  Synthetic Construct
attctcgacggaaagatgta

SEQ ID NO: 894 - DNA, 20 bp, Artificial Sequence
  Synthetic Construct
acggaaagatgtatgggctt

SEQ ID NO: 895 - DNA, 20 bp, Artificial Sequence
  Synthetic Construct
ccattggtccaagtgctatt

SEQ ID NO: 896 - DNA, 20 bp, Artificial Sequence
  Synthetic Construct
gcggcgcaagatctgatatt

SEQ ID NO: 897 - DNA, 20 bp, Artificial Sequence
  Synthetic Construct
aaaactaggccatccatgga
